United States Patent Application Publication US 2026/0275333 A1 - sequence listing, part 31

SEQ ID NO: 9594 - RNA, 94017 nt, Homo sapiens
  source 1..94017: mol_type = mRNA
cagtggctcacacctgtaatcccagcactttgggaggccgaggtgggtggatcacttgaggtcaggagttggagaccagcttggccaacatggtgaaaccctgtctctacaaaaaatacaaaaattagccgggcatgatagagagtgtacctgtaatcccagctactcgggaggctgaggcaggacaatcccttgaatctgcgagacaggttacagtgagctgagatctcaacactgcactccagcctgggcgacagagcaagactccatctcaaaatgtaccctgtaacaatatataagatgtcaacattagtagaagcactcaagcctagatgatagagagagattcagtctcaaaaaaaaaaaaaaaaaaaaaaagagaaagaaatggataaaagacttgaacaggcatttcaccataaaaagaaaccagtaatcacataaaaagttcaacgtcaagagcaatcagaaagcaaaccaaaacccaaatgaggcactccttccctccctccacataggcccagtgaaaaaacttggacaattcaaagtgttggcaagaacttagagccaggcacggtacctcatgcctggaattccagcactttggcaggccgaggcaggaggatcactggagctcaggagtttgagaacagcttgggcaacatagggagaccccatctaaaaaaaataaaatgagccaggcatggtagcacaggcttgtagtcccagctccttgggaagctgagacaggaggatcgcttgagcccaggaggtggagactgcagtgagctgtgattgcaccattgcactccagcctgggcctcagagtgagactatctcaagaaaaaacaaaaaccaataacaaaacaaaaacaaaacatagaggaaccgatgattatactgtgttggtatgatgaaaatcgccagactcccaataaaaaacatgacattatcaggtgaagctgagcatatatgtattttcttttctttctttccctccttttttttttttttttttgagacagagtcttgctctgtttccaggctagagtgcagtggcgtgatatcggctcactgcaacttccgcctcctggattcaagcaattctcctgcctcagcctcctgagtagctgggactacaggggtgtgccataatgcctggctatttttgtgtgtgtttttagtagagacagggtttcaccatgttggccaggatggtctcgatctcttgacctcatgatctgcccatctcagcctcccaaaatgctgggattacaggcatgaaccaccatgtctggccacatatatgtattttctgacccagccatccttactcatgtgtgccagcacacaagtctgaagtctgaggatggtcataaaaacttttttttgtaataaacctgagcttgaaacaacccaaaagtccatgacctggagaacagatgaatagccaatagaagattcatacaaaggaatactatgcagcagtaaaaaatgcaagccttacagccacatgcagcgatatggatgaatatcagcagaatcacattgagcaaacaaaacagattagcagtccaggtgctgtggctcacacctgtaatcccagcactttgggaggctgaggtgggtggatcacctgaggtcaggagtttgagaccagcctggccaacatggtgaaaccctgtctctactaaaaatacaaaaattatcactgcaacctccatggccaggcatagtggctcatgcctgtaatcccagcattttgggaggccgagatgggcagatcacctgaggtcaggagttcgagaccagcctgaccaacatggagaaaccccgtctctactaaaaattacaaaaaaattagctgggcatggtggcacatgcctgtaatcccagctactcaggaggctgaggcaggagaattgcttgaacctgggaggcggaggttgcggtgagctgagatcgtgccattgcactccagcttgggcaacaagagcaaaactctgtctcaaaaaaaaaaaaaaaaaaaaaaaaaaaaaaaaagccaggcaaggtgatgggcgcctgtaatcccagctactcgggaggctgaggtaggagaatcgcttgaacctgggaggcagagattgcagtgagcggagattgtgccactgcactccagcctgggtgacagagtgcagctctgtttcaaaaaacaaacaaacaaacagattagtaaagaatgtgaacaaagtcaaatgaggtggctcatgcctgtaatttcagcactttgggagtccaaggcaggcagattgtttgaaccccagagttcaagacaagcctgggcaacatagtgagaccctcatctctaattagccaggcatggaggtgcatgcctgttgttccaggtacttgggaggctgagacaggaggattgtctgagctcaggagctcacaccactgtactacagcctgggtgacacaatgagaccttgtctcaaaaaaatagaaacatgcaagaggtaaccatgtattgtttgctaaggagcatgtggtaaactataaggaaaaggaagaaaatgaaaaacaaaatttgtgatagttcttccatctgcagggaaggattatgagattggggagaggcacatgggggtcttttattgtgatggtatttttttttttttttgagacggagtctctctctgtcacccaggctggagtacagtggcccgatctcggctcactgcaagctccgcctcccggattcacgcctttctcctgcctcagcctcctgagtagctgggaatacaggcgcccgccaccacgcccggctaattttttgtatttttagtagagacgggttttaccgtgttagccaggatggtctcgatctcctgaccttgtgatcaccccgcctcagcctcccaaagtgctggtattataggcgtgagccaccgagcccggtcgatggtaattttttttatccaagcctgctcctcatagtttatctactcattgatgtttaataaaacatcaatgttttattgattatcaatgtttaataaaacatctactcattgatgtttaataaaaatttaagaccaggcatggtggctcatgagcctgtaatcccaacattttgggaggctgagacgggaggatcacttgagcccaggagtttgagacagcctgtgcgacatggtgaaactctgtctctacaaaaaatacaaaaattagctgtgctgatttttttaaaaatttaaagcagtgacagatacaaacatggttactattaggcattaagattacaactggggccaggcgcggtggctcattcgtgtaatcccagcattttgggaggccacggtgggtggatcacttgaggtcaggagtttgagaccagcctggccaacatggtgaaaccccatctctacaaaaaatacaaaaaaattagctggatgtggtggcgagcgcctgtaatcccagctactcaggaggctgaggcaggaagatcacttggaggttgaggttgcagtgaactgagatggtgccactgcactccagcctgggccacagattgagactacacctccaaaaaaaaaaaaattacaactggtttcacatgttaactcatgtaatacctccagcaaccttgtgaggcaggacttgttatcatattcattctacaggtgcggaaactgaggcacgaggaggtcacaagacctgcccaaggccatgcttgtgatgagagacagagtttggttttgaacaatggcctcactcaactccatgcacattctgcatttatgaagctctttcatgtgggctgggggcaggagaccctgtggggctcagcctttcatgctagtttaggtgccagtgatacagcgagcaggttgcagggcaaggggcccacatggagctgcccagtttgatatgtggggagggggccaggcgcagtggctcaggtctgaatcccagcactttgggaggccgagatgggcggatcccctgaggtcaagtgttcaagaccaggctggccaacatggtgaaacctcgtctctactaaaaataaaaaaaataaaataaaaaaaaaaagctgggcatggtggcatgcgcctgtagtcccagctactcggggaggctgaggcaggagaatctcttgatcccaggaggcagaggttgcagtgagccaagattgcgtcactgcattccagcctgggctgcagagggagactccatctaaaaaaaagaaaagtggggaggagtggcagagtttcgttcgggtcagggcccaatcagaggaagggataggggctgggggagtccagagaggagaaacaaaggctcagcttggggcagtcagggaagccttcctggaggagaggatattcagacaagacattgatggatgaaaaggagttcagagtgtgggcaaggacccatgggctggatggcttagagacatagagagagacctagacaggatgcagtagagctgcaaaaagactttacagagagaggctaagagacacatgactgagagagcagtggacagagtcagaggaacagagacccagggagagaaagagaccaggcagtagagttagagagacagagacgtagagacagaggaagagagatactcagagaacaggaccatctgcccggtgctggtgccgggcgtacacacaagagcttgcatttgcctgtacttgcttgagtattgcagggaggcgtttgcccaggttaccagggcaggaatgtccatgcatgggtggcgggggcacgtgcaccatttcagtgcaggtgagggtctgcacaggaggaaacctgcttgggggccgccgtcgccccttgtccccctgcaacgaggaggtgtggggcgaggcgccccttcccggagccaggccctttaacgcccccccagcccgcagcgcccccgccccatcaggcgtccctgggctccgcctgcccgccccgcatcagcgccacgtcaggcgctgtccgcgcccccggtgctgaaccaagatggccggtggcggccgggccccggcgtgagccaagcgcgggctgcagccgggagatgccccagcccagcggccgctgagcccgacccgacagagccggcccggccgcctccggcccacctgcgagctcggagacatgtctctgctttgcgttggaggtaggaggcgaggctgggggtcgggggacccgtgtggacgcgggctggggtcggggtccgcgtggatgcggctcccagggggttcctggggggtgacccgagtccaggtggctggacttttgagaggggtagcccttgtcgacgcagctgggccccggagggggtgatccgtgtagacgcggcagggctctcgggggtcctggtggccgctgctggaggggtcgtgtggacgcggctgaacgcggaggcccgtgtggacgtggacgggtatccggggttctacccggaaacgatctagactggggcgtctgtgtagaccaggtttttagagggtcagtgaggaagagtctgggctcggtagtttgattgaagcctgcaggggtgcttggaaggggtctggtgttgtgggctgggttacgggtcctcatggacgcggacccggctggaaattcgaaggagagtgcggtgggagggttctccaagccgtggggatgtaagatataggtagaggggcttggccatcagggcatccacgagttctaggactctcccagccctaggtgtaaagaggactggagtggggggagtgtggagacaggagacccctcccagcgtccagagagggctgtgactggaggtctgggggcgcttttccagttaactctttggcctcccgagtgagggggttggaggaatgtccagaaggtcttcccgctccctgccccctccggttctcccaaacacgtttcagggccttctcggcagggagcctacttcttggaagagcaatgtctcctggtccccctcctggcccatcctcacctcacccactttgcactggagagagggagggagggagacgtgaggtggggggggagctattttggggccagaacgccatctgcacagaggcccacgcccaggcccacgctctgcgttggggttggaggagggagggagacgtgggaggggcatgaccccccaccccacacctttatggctctggggtcgtggggaagccagcccaaccgaacccaggcgttctgggcactcccgtttgagaaatcaaactctgggagaccttgggcggcaggggtggatgtggaccgccgttccacgcctacagagctctgaacccctggttcttaaggactggggtccccccgtcactcccacccatttcaagaaggctggggtgggggaaggggtgtgtctgccaagcctgagactgcaggcttcgggagacctcgggcgacaggaagcgtgcgtgtgctgaactcctgctgcctggacacagggtgggcaggccggggagccgggaaccgcccccgccgcccctcctcctccctcccctccccctcggccgattcattcacaaaccctgccccgcccgcccgctccccgccgcggcagcttccgagtgcaaatccggccgggctgggccggcgtggacgcgggtgttcttaaagggacaggggcctactttctctaagctcgtttctgctggacggggctgggggtggtggaagaagggtccctagagtcaaaggtcaactcctccatcccctagcctccaggcctatggagttaggggagtagggaagtgaaggagacccctaggcgacccccaccgcctaggcctgaggacggaatgggaggagaacttgaatgtccagaccccctactgacctctccccctgctctaagtagccgggctcttaaaggtggcactggaggaggttccgacgtgggtgttcttggctgactcctctatcctctctcttctccccccagcatcccgccccaccccgcctcacatcctccaagttgggcttctctggaaggtttgcctagtggagtgggggggggggggggggggcggggatctcacccttaactctgacgcaaacaggaggctcggctgcgggggtggcattaagggggggcagcaggaggcaagagggatgaggcttccagaaacagagacgttgggggaggactgtgctggattctgtggactttacagggaggggcccggctgagtggagaggaatcgctgggaggggcaaggctggggaagaggttgacaggggtgggaggtaaggccctcaggtgtaaagggaggtgtgaggttggagtgaggaggagtaggaggcagggaggggtggggagagggagaagtgctgggtgaggccagtctcccagggagaggtgggatggtgcccagagaggggaggggctgggatggctgagcacgagagatgttggggtgggcttggcaggagtgaagctaggctgagatgggttgccgtgttgcctgagctcagctgaggaaatacctgtcccccctcccctccaccggggacccacaggcgtttgccaatccctacacacattcatacccagacttgttcctgtgtggacacaaatgcttaggatgtatgaaggctctacgcagaccatgtgcctgggaaggcacattccgtaggcacacgtgtgtactcaaatgcctgtgtgaacacaagcatacacgtgtatataggacacagtctgccgctacagatatagtcccagcaacacacgtgtgagtgtgtgtgtctgccagcacgcatatagatgtatccacgtgtctgatgaatgctcacaatatacatgtcacataaagatccacccatgtccagccgagcgcggtggctcaggcctgtaatctcatcactttgactttgggaggccaaggtgggcagatcacttgaggtcaggagttcaagaccagcctggccaacatggtgaaactttgtcactgctaaaaaataaaaaaaattagccaggtgtggtggcgcgcacctgtagtctcagctactcgggaggctgaggaaggagaatcacttgaataggggaggtggaggttgcagtgagctgagatcctgccactgtactccagcctgggcaacacagtgagactctgtctcaaaaaaaaagattcactcatgtcctaacactcagacatgtacccatacatatctgttaaggtccccaaccccatgaagcacatatatattcatataagcacatgtcaaagccatgtgtgtatgcacatgacaacacttgcctggacattcaaagcagcccctttcaacaagtggatgatgatgcatacaagtaaatacacatttgagtatttcattgcacacaagtgcatacatgtatgcagataaacaaatacagctgccacagaactgcatccatgtacacatgcaaacatcaatatgtgtgttttccacctaacatatcacccacaagctcacacacaccagtgtgtctctgatgtagtgacaccccactcctagacacacatgtgcagactcccacctgcacttaaatggtgcacatactctgcacacatgcacactcatatccatgtagaggcaggcacctgcctgccctggtaagatgagccaactactgctgcaaatacccaagcaagtacaggcaaatgcaagctcttgtgtatacacccagcaccaacacatagcagaccaccctgtatggtgtatgggccttatctctgcccgcttcatttatttattcatgtggtgccccgctgcttcccaacatcgtaatccactgactaggtcttggcaggatcctgaggctgtgaatggtaaatgccacctggttccttcatgaagtcacttattttatttatgcaacaagcattaattgagcacctactgtataccaggcactgttcctggctctgggacccagccctattcctagccatcactcctgcacgtcccatggggttagaatgaaagagatgagggagggctaagggagctgaggagtggggtatccagggctctcttcctctgggaagcctaccctgattccaccaccaccatttacttgagtctcagaagatgtgatgagggggagatgagcaggagggagatggtgctctgggtggagggaacagcatgagcaaaagcatggtggtgtgaagggttacttccagatcttcctatgtgcctcacagcattttgcacaggccacttgatgttttgttttgttttgagacagagtctcactcaaagcctgttactcaggctgcagtgcagtggcatgatctcagcttgctgcagccttgacctccagggctcaagtgatcctcctgcctcagcctcccaagtagctgggagtataggcatgcaccaccacacccggctgacttttttctttttaattttttgcagaagcagggttttgccctgctgcccaggctggtcttgaactcctgggctcaagtgattcaccctcctcagcctcccaaagtgctaggattacaggtgtgagccaccacgcccaactgatgttttaaaggctctataaacatgttatgaataaatgacatgaacaaatcagtgaatttaggtgagggtgggtttgcttcacaacttacaataatatcaacaacaaaccccatttatccagcttttttgtttgtttgtttgttttttgagacacggtctcactctgtcacccggactgcagtgtagtggtgtgatctcggttcactgaaacctccaccttccaagttcaagcgattttcctgcctcagcctcccgagtagctgggattacaggcacgtgctaccacacctagctagtttttgtatttttagtagagatggggtttctcatctctactaaaaatacaaatacatctctagtggccaggctggtcttgaactcctgacttcaagtgatcctcttgcctcggcctcccaatgtactgagattacaggctcgagccaccgtgcccagcccagcatttcataggcatgatgttaaggatttttatgcccatgccctctttaactcttacagtagccccattgtacagatgaggaaaactgaggctcagggagctttaacaacttgcctggtggaacagagccagaggtggagctgactgactctagagcctactggggttggcagaagtttgagccttctctcagaccccaggacctcggagacagccaagtcccttctgtggagtgatgttctgccctgggattgccttcttctttctatttatttatttattggagacagagtctggctctgttgcccaagctggagtgcagtggcacaatttcagttcactgtaacctcctcctcccgggttcaagcaattctcctgcctcagcctcctgagtagctgagattacagatgcacaccatcatgcccagctaattttttgtatttttagtggagatggggtttcaccatgctagccaggctggcctcgaactcctgaccaccaagtgatctacctgctttggcctcccaaagtgctgggattacaggcatgagccactgtgcccagccaggattgctttcttctctcatgcatctagtaaacagacatgtcacaatctctccattcatcggggctattcccctgctccttgcctaagaagccttcacacatccctccgttcctggctactcagtccctgataccctccagctaggaggagctgcatctaggtcttagctcctaccgttctcatgggatgccctccagagttgcatcttcagggctgcagcctaaccctttccctaacctggcctcacttttcttccacatacaatggacctcttctgcaaggtgccaataagggcatcctgggtccagcaggcctgagtgtgaattgctaagtccaccacttcctggcaagtctcacatcctctgcattccttggtgtgctcatctgtggaatgggcacaggagtagcatccaccatctacgtttgccagaactctctaatgaggcttgcagagcccctggcatgactcctggcctacgggaaggcccaataatcgtgagcaaaagacatgaaaaatcaatgatgggccggccccggtggctcacgcctgtaatcccagcactttgggaggcctaggcgggcagatctcctgagctcaggagttcaagaccaccctgggcaacatggtgaaaccctgtctttactaaaatacaaaaaaattagctgggtatggtggcgcgcgcctgtagtcccagctactcagggggctgaggcacgagaatcgcttaagccccgaaggcggaggttgcagtgagccgaggtcgcgccactgcactccagcttgggctacagagtgagactccgtcaaaaaaaaaaaaaaaaaaaaatcaatgatgatgtttttattaatggagactaaaagctttctggaaggcggttctgagtgcaggacatttctgagagtccactgcattctggggcccgaggagcgctccaagaggggtcccccagggccactccaggagggagcctagttcgttgagggtacacgggtgggaccgagcattcagcaccgtggacagcgcctgcccgcgcctctgggggacagctcttagctcagcctcccaggattaatggaggaggtgacgtcattccttccgtgaattactatttaatgagcacctactataggctaggcctacttctaagtggttcatggtaaacaacacacacacaaatcccttattcccgaagctctctggaactccaggttcttggtgttttttacactgaaggctcagtctggctctggtctatttgtgtcaacggaggataagggtcctcatttagtgtctcccagatgcgaaaccagcacagctgaggtcttttatcctaaagcccatccatctcccgctgaaatgccctccaccaacatcacacacaaaacgatcaaatctcctataatctatttctggattctctatgcttcctcccttcccccaagctaatcctggggcgggtgggctttcagaagccctagacggctggatctccacctcctgtctccccaccccatcccacgtggcaggtcagggagccagtgccccaagactgcagtcccccctaattagaatccagggtcagtcagccatgtggttcacgcctgtaattccaacactttgggaggccgaggggatggcttgagccttgaagccagccatagcaacatagcaagaccccatctctacaaaaaaaaaaaaaaaaaaaaaggaatagccaagcatggtgatgcgcacctgcagtctcagctactcgagaggctgagtggggaggatcgcttgaacctgggagatcgaggctgcagtgagccatgatcacaccactgccctccagcctggagcctgggcaacagagagagaccctgtcaaaaaaaaaaaaaaaaaaaaaaagaaaagaaaagaaaaaaaaagaagaagaagaagagaaaagaaagaaaaagaaaagaatccagggtattcaaatcctagaatccaggccagggacacctttagaacacaaccaaataataaaaacagtaaagatatcagtaataataataatagtataaatgacactataatcattctgcagaaggggtgagggaggaagaggagggaagaagaggaggagaaaggagagggaagggagatcagccactccgtctccccattttccagatgcagaaacggaggcgcgaagccaggctgcaggggtgtcccgcagcctgaactcctgcctcagcctccccgggtacggccactacattcatcagtcagcgcttctgggggccccaaagacctttgaggccgcatgacgcggtgtcttcacccgctcgtcgctggggacagcagtgggcacccccctcatccccgcccccctgtccgccggcgcgcctcccacgccctccgcgcgcccacgctataaatagcctcatgcgtgtgacccgaagcccgctggggaagggtggcgcttccgccccgctgaccctgatacagcaacccggcgcaggcggggaggtggcgggatgtgacgacgaagacggtgactcagggaccatttactgaccggggaagacagggagagagactgggttccttctctgagcccccttcctcctccaagcctctcccccgataccaccctcccctctgcgcccatcccccttcccgaatcccctccctcaccgcgaacacccttccctcctgagaaccccctcgccactctcggccccctttcctgtccccttttccctctgagacccctctcccactgggagccccagtgatgaaaaatcatggatgtcctcaacctggacctcggcagggagctaagtgcaggagcctggcttcagctatcagagggtacagccctccagccggtcccccactgcctgaggaccccaacggagaccattcccctctagccaagagaggctgcaggaaggagctgaggcttagggaagaggagccggactgaccaagggaggggcacaagaagggcagagacagtgagagagagaaggagagaacagagaccaaaagaagacgaccagagtggagagaaatagaacggggaggagggagatgagagacagggattgggaaagagagagagagaacagatcaaggagctactgggctccccgctgagcctaaatccatggtttataaaacagggcacagttggaggagcttcaagtgagcccagcccagtctagaccccagtgagccccttgtatcaccccccagagcctgtcactttcccacccccatatgcatccctacttttctcccccaactgcctctcctctccccagtgtctcctccacctgcctgccctccctagtggaaatctttccccctctctcttttattattattattattattatatattttttgagacagagtcttgctctgtcgcccaggctggagtgcaatggcgtgatcttggctcactgcaacctccgcctcctgggttcaagcgattctcctgcctcagcctcccgagtagctgggactacaggcgtgcaccatcatgcccggctaatttttgtatttttaatagagatggggttttaccatgttgcccaggctggtctcgaactcctgacctcatgtgatccacctgcctcggcctcaaagtgctgggattacagatgtgggctaccacgcccagcctctctcccttttaaattattatttttagacatgggatcttactacattgcccaggctggtcttgaactcctgggctcaagggatcctcctgccttagccttcctagtagctgggattacaggcatgtgcctctatgcctggtactctcgctgtctccttgtgtctctctatttctctccatctgtccagactctcctctcttgctttcatgcccatcatttcttcctctctcctctcccttcctctccctgtatgagtccctccagctgtgggtgcctttctcagcctctgtcagcatcccctccacccccgatcccgtcacattctacctcttgccccttcccctgcccacccccttcacagagagtccccacgcctgcaggctggacctcctccaggagccaggcccaaagctcctgctgggcacattcctgagtgttcctgagcctctttcagtcccaggggtgaggtgctgggtgggtgcgctccctgggggctgggtggggctgaggatgtgagcgaacaaaccagacctagaaaaaaaaaagacagagatggaagcagagatgaaggcccagagagaggggttcacttgcccagggtcacacagctcaggaatctgaacctggctcaaaccagcattcacttctctcaaggcccacccaagggctgcagtgcagtggcacaatctcagctcactgcaacctctgccttccaggttaaagggattctcctgcctcagcctcccgagtagctgggattagaggtgcgtgccaccacacccggctaatttttgttattttaggagagacgaggtttccccatgttgttcaggctggtctcgaactcctgacgtcaagtgatccacctgcctcggcctcccaaagtgctgggattacaggcatgagccaccgcgcctggccaggaacagtctttactgacatgtgtttagggccatcgcacttcccccgctcttcacgggaattctctcttcactggctccactcaggtgccttttgtgagacagaaattcaagcgatgaggacagagatacaaacccgggatgggaggctgtgacatctgcccatagaaacacaattctgtttctaggaatttatccttcaactcgctagtacacgctcttcaagacatactgaaaaaacatgaaggattagaacagtgggtgtcgaatgctaccatttgtcttggaaatcaagcaaaacgaacgtgggtatggttgccgacgcatggaccatctccagtggaacaaggaactgccaacgttgattgcatttgggagggagatgaagggctgggatggaaagagctttattctcagtgcctcatcttttggttgttttggattttacaacatgtgcatgcattgcctacacaaacaaagacactaatttgaaaaggaaaaggggagaagaaaagagggaggaaagaaaaggggccggtgtggcagctcacacctgtcatcccagcaccttgggaggccaaggcggatggatcacctgagatcaggagtttgagaccagcctggccgacatatactgaaaccctgtctctactaaaaaatacaaaaattagctgggcatggtggcgcacgcctgtagtcccagctacttgggaagctgaggcaggagaattgcttgaatctgggaggtagaagttgcggtgagctgagatggcaccactgcactccagcctgggcaatagagcaagactccgtccctaaaaaaaaaaagaaaaaaaaaaagaaaagaaagaaaggaaagggagggaagagctcagtgtgggagaagattgggggtgggagtagagaattaatggaggaaaaagatgtgggggacaaaagcaaggtgtgagaggtgttggcaatggaaactgaatacctgttgagaagagccaggagggggcgacatggctttgaatctcttggggctgtgagattatgtgaaatgtgagaagactggacctcagtggggtgcctgacatatattcaggttacacctcccacaagcaggtggggctggacaatctctgtcaaccctccagccaggacccaagtgtctccctgtacattacttttggttgttgttgagacaagaatctcactctgctgcccaggctggagtgcagtggcatgatcttggctcactgcaatctctgcctcctgggttcaagtgattctcctacctcagcctcccaagtagctgagactataggcgcctgccaccacacctggcaaatttttgtatttttagtagagacaaggattcaccatgttggccaggctggtcttgaactcctgacctcaggtgatccacctgcttcagccacctaaagtgctggggttataggtgtgagccaccgtgcctcgccctccacatgcattttgagagccagctctctgggttgctttgtcccaactcacccagccttctttgaggcttccccaaaccctgggagcatttgacattgcagactgagctggacaatcaagggagaggtcttgctgacctgtcggggctggtggagtcatcagagattgtctttatcctcgccttcttcttctccacctcctcaacttcccctcttcttctggggcaatcctggagggcttcttgtaggaggcctctcccaccatctgcccagctctttctttctaatcttgttcaattgtgggtaaaggcacagctagttgggagcttggggagtttgatggggacaggggatgcagggagagggaggggcagggaatgctctcagggtccaaatttccttccattctagggttgcctgtgctcatctgtctgatggcttctctctctccctctcatccctgcctcctctttcctacctctcctcctccccttgtctctgtctctgacattgcttctatctttcttttttaacatctgtctcttttgctttttatctttgcctgtctctcctctgtgtctctctccttatgtctccatcttggtgtgtctctgaatctctccgtatctctgcctcctcctccccacatctctccccacctcccttccctatctctgtctctctccacagtcaaaaaagccaagtttgatggtgcccaaggtaagtggcttctcttgctgtcctgtcccgtgttgtctgtctgtctgtctgtctcttggagagactgggagggggtcccagcccagacttagagttgggctttatgtcttctgagcatcaggagaggggtcagaagattaaatagggggaggggcagccattggcctggggtccctgcagtttgtatgggggtccccgggtctccccagccatccttggagagtctgtaaggggtggggcttgccctgagccagtggctcttcccagggtcctaagaggtagaatggggactcttagatggggctacaggtgggaaaaatgaggctcagagaggcgaaaggagtttctttcttttcttcttcttcttttttttttttttttgagacagagtctccttctgttgcccaggctggagtgcagtggcgtgatctcggctcactgcaacctctgcctctgggttcaagcaattctcctgcctcagcctcccaagtagctgggattacaggcgccctctaccacgcccggctaatttttttatttttagtagagatggggtttcgccatgttggccaggctggtctcaaacttctgaccttaaatgatccgcccgcctcggcctcccaaagtgctaggattgcaggcgtgagctaccgtgccctgcctttttattattattatttttatttaaaatttttattttttgaggctggagtgccgtggtgcaatcatgttttactacagcctcaacctcccaggctcaagcaatcctcccacctcagccttccaagtagctgggaccacaggcgtgcaccactgcacccagctaattatttttttgtattttttagtagagatagggttttgccaagttgcccaggctggtcttgaactgctgggctcaagcaatcctccccccttgacctcccaaagtgctggcattataggcgcgagccactgcacccagcctgcaaagggggtttcttacagtcaattttgttccccttttctgggacctcagtctttttagctgaaaaccaatggcatggtcatttcgaagcagctggatgaagtatcccaaaattccacgtctccccacactgaggcccctcccttgtgccctgagggtggggttgtgggttagggggtgagtggcccagaaattcctgaggggatcacagcagatggtctagagcttgggaaggggcattggagagtccctgagccccagcgctgacccctactctcactgccacagagaaattcaacacgtacgtgaccctgaaagtgcagaatgtcaagagcacgaccatcgcggtgcggggcagccagcccagctgggagcaggatttcatgttgtgagtctgcagcgtctggcatgacctcactccctggcatagcccagcacctcgctggcccctcagggcagagctggacactggggaatcccgggtgactcccctctgtcctccctcttcccctgtccaccttatcaccttcacctccaaaacacatccccaatccaatcacttcccttggtctccgcagccaccagccaagtccctgctgcccgccagcctccgccctggcctcctgtgccatccacctcctacaatctgttctcctccaggcagccagggggatatttttaaaactgcaaatcacatcctgtcgctcccatgttccaaacttgtccgtggctcatcgacctcacaataaaacccacagccttccccgtgattcccaccaggttctcgctctatctccctcacctgccccagccacacccacctctgcccctttctccaacacttcccagcttgttcttgccccagggcccttgcacttgctctcctgtccccagctggctcttctccttcaggtctcagcttgtgtcacctcctcagtgaagccctccctgaccactacctccaagctacaatttcagggcatcatgccttcccaggccttgccaccaattttgtttgtttgtttgtttgttttgaggcagagcctcactctgttgcccaggctggagtacagtggcataatctcggctcacttcaacctccacctcccaggttcaagtgatcctcctgcctcagcctcccaactagctgggattacaagcgtgtgccaccacacccggctaatttttgtgttttaagtagagatggtgtttcactatggtggccaggctagtctcaaactcctggactcaggtgatccgcccacctcagcctcccaaggtgctgggattatagatgtgagccaccatgcctggccaatggaatttttttccttttttttttgttttgttttgagacagagcctcactctgtggcccaggctggagtgtagtggtgcaatctcggctcactgcaacctctgcctcctgggttcaagctattctcctgccttagcctcccgagtagctgggactacatgtgcgtgccaccatgcccggctaatttttgtgtatttagtaaagaccgggtttcaccatgttggccaggctggtcttgaacttttaacctcaggtgatccacccgcctcggcctcccaaagtgctgggattataggcatgagccaggagccaccaatcccagccaacagatatatatatcagatatatatatacttttttttttttttttgagactgagttttgcttttgttgcccaggctggagtgcaatggcgtgatctcggctcaccgcaacctccgcctcctgggttcaagcaattctcctgcctcagcctcccgagtagctggaattacagacatgcaccaccacgcccggctaattttgtatttttagtggagatggggtttctccatgttggtcaggctggtcttaaattcccaacctcaggtgatccgcccatctcggcctcccaaagtgctgggattacaggcgtgagccaccgtggttggccatattttaaaaatatatttcttaagataaatctttggtaaactgtaaattcagtgaatctcacatttcaccaagtttcctgctcccccgaattcacatatgtctagggcgaggcctgcagggaaagtgctttgaggtgggatcgtgtcctcacatcattagatggggatgacactgggaaggacagaggtgacccgaatgtccttatcctgtaggtaaagggagctatggagggtatttgagcctcttcctcacttacccagcatggtcagtgttggagggcccaaggaagggctcagaaagatgaaggtgcaggcgatgtgtaacatctgtccccacgccatccttcccggctttgaatcctggttcttttgtgataccccgagctcttaacttcccccactggcctcagtttcccctctataaaatgagaaccaccatgttaccctaccacctaggacactcccaggcctaggtttgaattgcagtatgctgtgtgttctcaggcgaatcaactaaactccctgggcccccgtttcctccctcctgctccctcgacgccccctctcctttttctgcagcgagattaaccgtctggatttgggactgacggtggaggtgtggaataagggtctcatctgggacacaatggtgggcactgtgtggatcccactgaggaccatccgccagtccaatgaggtgagtggcgggtggcctgagggtgaagaaggaggagtgccttgcagaagcccagagaccagtggactaaacaagatgggcatttatctcctatcccctgacaacatcaatgtagacacttgggattgccacgaaccttccaaagtcactagagcctatacaccttccatcttgctctgcctctctctccatgtggcttccaccttgtggccccaaatggctgctttaggctcaccattgcatcttcattccaaccaccgaaaggtgctggtggtgggggaggggggtggttcatgcacatctcattggccagaacttagacatgtggccaacaccttgctgcaagggattctgggaaatgtagtcctaggctggaaaatgtagtcctgggctgtgcttccctaggcacagctaaaaatgtattaccttggaaggagaaaagggataatataggcaattagcattttgtgtcccagatgggcagcagcaggaagcttacaccaactcataagaaggtgctaggtaacaaccctggcccctcagcctgtgcatcattgtcagcaggtagtagtgatgtctattttttatttaattatttatttttgagacagggtctcactctgttgcccaggctggagtgcattggcatgatcatggcccactgcagcctcgacttcccaggctcaagtgatcctcccacctcagcctcctgagtagctgggactgcaggtgcatgccaccaggccccccttattttttttgtatttttaatagagacagggttttgccatgttgcccaggctggtttcgaactcctgggctcaagcaatccacccacctcagcctcccaaagtgctggtattacaggtgcgagccaccatgccaggccgtggtcatgtctattcatctgtccccacagcccaatccctggcctcctaacctcaagtctcaacctctccatgctgaccccaggaaggccttattagctggagctctgatctgtcctcccctgtccatctgccttgggaggcccttcagatggcacctgcccactagcctcatctccccccacactctaacctctacccctcccagattccaccctctgaacctttgcatagtgtgttccctgagcttcaagtgtcctcctttccatcaccttctaaattcccatgtgcccacctccaggaagccctctctgacttctctctagatcctttagccctccttcctccctctgggctatgacctcatggggctgggggtgcctgtgtccagccctgtttccaagggctatgggctctcaggagccagggtgatgatggctgggcctcttggggaccctggcatcacccaatatgaaccaggcatagaggagggactggggactgttttttgtttgttcgtttttgtcattttattttattttattttattttattttattttattttattttattttattttactgtgagatggagtctcactctgtcacccaggctggagtgcaatggcacaatcttggctcactgcaacctctgcctccctggcttaagtgattctcctgcctcaacctcctgagtagctgggattacaggggcctgccaccacacccaactaatttttgcatttttagtagagatggggtttcgccatgttggccaggctggtcttgaactcctgacctcaagtgatccgcccaccttggcctcgcaaagtgctgggattacaggtgtgagtcaccgcacctggccagtgagtgtttgtttttgaatgaatgaatgcagagggacgaaatggttgcaacaatctaggtaagcgagtctaaaaggaagccttggctgggcatggtggctcacacctgtaatcccagcactttgggaggctgaggcaggtggattgcctgagctcagcagaccagcctgggcaacatggtgaaaccccgtctctactcaaaaatacaaaaaattagccaggagtgctggcacgtacctgtaatcccagcagctcaggaggctgagttaggagaatcacttgagcctgggaagcggaggttgcagtgagctgagatcacgccactgcactccagcctgggtgatagagagactctgtctcaaaaaaattaaattaggccgggcatggtggctcatgcctgtaatcccagcactttgggaggccgagatgggtggatcacgaggtcaggagattgagaccatcctggctaacacggtgaaaccccgtctctactaaatatacaaaaaatcagccaggcgtggtggcgggtgcctgtagtcccagctactcgggaagctgaggcaggagaatggcgtgaacccaggaggcagagcttgcagtgagccgagatcgcgccactgcactccagcctgggcgacagagcgagactctgtctcaaaaaaaaaaaaaaaagaaaagaaaagaaaaaagagagagaaaggaaggaaggaaaagaaaggaataaaggaaggaagggaggaagggaaagaaagaaaggaaggaagcagggagggagggagggaaggaaggaagggaaggaaggaaggacggaaggaaagatagagaggggacatgactttggttttggggtaggggtgagggggatgtctcatgcgagagtaggggccctggggactagtgaccagcagattcctgacccacacacctcctcccccaacccccaggagggccctggagagtggctgacgctggactcccaggtcatcatggcagacagtgagatctgtggcaccaaggaccccaccttccaccgcatcctcctggacacgcgctttgagctacccttaggtgagtacaggggcccgggaccttcacccagccccagccccagttgtggactcactcagctattccaggagagtgaacaggcctgggtaggtctagctgacccttcaggctgagaatgagggtccttcgccccggaggagagagagtttcttgggttgcagagaacagggatgtgaacctgctgggtgcgggccatgacctgggccccgtagcttcccagtgagctgcaagtgcttcacgaccgagggcgttcagggttgagctatcctggctgttccttggtgatgcctgagactgcaacagtgaactggggataggaggagagacagacagagacagagagacaaagagagacagagagagacatgtagacagaggctgagaacagatagtcccctcttcctttcctggaagcaccttgagtctctccacctcattcttctaagaacccatggctggccaggcatagcttctcatgtctgtaatcccagcactttgggaggccaaggggggaggatcatttgaggccaggagtttgagaccagcctgggccatctagtgagatcccatctctatgaaaaagttaaaaattcaccaggcatggtgctgggtttctgtagtcccaactatttgggaggctgaggcaagaggatggctcaagcccaggagtttgaggcttcagtgagttgtgattgtgccactgcactccagcctgggtgacagagcgagaccctgtctctaaaaaaataaaaataaaaacaatgggctgggcgtggtggctcatgcctataatcccagcactttgagaggccgaggcagatggatcacctgatgtcaggagtttgagagcagcctggccaacatggagaaaccctgtctctactcaaaatacaaaaaaattaactgggcatggtggtgcacacctgtaatcccagctactcgggaggctgaggcaggagaatcgcttgaacccaggaggtggaggttgcagtgaactgagattgtaccacttcactccagcctgggcaacagagtgagactccgtctcaaaaaacaatttaaaaattaaaaaattaaataaaaacaatggcttccccaccctcgtaaaggctaggaaccatctcctgtcatcctccaactattctccattcagctctgggaagaggggcgtcagaggcaccacggtacctccccttcatctccatccaccctcctgagaccgcagaccaacccacccctacttctgaggctttgccaaagaccccagaagccagggcccgggtggagctcagtaggcctggaggatggaggctgagcggcagggagggtcttccaggctcacagacagggctctgcttgcagacattcctgaagaggaggctcgctactgggccaagaagctggagcagctcaatgctatgcgggaccaggatgaagtgagtgttggggtgggaggggactgtttcttccttgtttctgtctctgtctccccatgattttcacttacagatgctgtttctctctaagcttgtctttccctgcatctctgtttctaactctttgtaacctgactgcatccatgacccatgtggtccagtctctagacaatgatggggtcaagaaacacacagaggccaggcgcagtggctcacgcctgtaatcccagcactttgagaggcgaaggtgggcagatcacctgaggtcaggagttcaagaccagcctggtcaacacagtgaaaccccgtctctactaaaaaaaaaaaaaaaaaaaaaaaattagccaggcttagtggctcacacctgtaatcccagcaatttgggaggctgtggcgggcagattatttgaggccaggagttcgagaccagcctggccaacacggtgaaaccccgtctctactaaaagtacaaaaaattagctaggcatggtggcgggcgcctgtcattccagctccttgggaggctgaggtgggagaatcacttgaatctgggaggcagaagttgcagtgagccgagatcacgctgctgcactccagcctgggcaacagagcaaggctctgtctcaaaataataatattgataataataataaaataaaaaattttacttttcatttggcggatacatgtgcaggtttgttacacgaatatattgcatgatgctaaggtctggaattccatggcattactcaaattgtaaacacagtacctaacgggtagttttttcactcttgtcctgctccctccttcctcccttctggagtccccaatgtctactgttcccatctttttttttttttcttttttgagacggagtctcgctgtgtcaccaggctggagtgcagtggcacgatcttggctcactgcaacctccacctcccgggttcaagtgattctcctgcctcggcctcccgggtaactgggactacaggcatgcgccaccatacctggctaatttttgtatttttagtagagacggggtttcaccgtttagctaggatggtctcgatctcttgacctcgtgatctgcccgcttcggcctcccaaagtgctgggattacaggtgtgagtcactgcacctggcccctagtcttttttctatctctgtttcttactttttctgtctctgtctctgtctctgtctttctctctctctctctctctctctctctctcgtgtgtgtgtgtgtctttctctccttttctctcttactccctgtatccttctcatagagagggagagaatttgggaggtagagggaagtcgggatgggacagaacagaggactatcctggtcccctggcctttggcccctctgagagaagccctttctccttcctccaccccttcagtattcgttccaagatgagcaagacaagcctctgcctgtccccagcaaccagtgctgtaagtacctcttgattcttccttgggtatcagctgaaatcctcatccctcccctaccccatgactgtcctgtctaaaggctcctccagtccggagatacaagtcctgagagtgcagtgtccacttacagtgtattagaaatcagcgttctgaggctgggcatggtggctcacccctgtaatcccagcactttgggaagccgaggtcaggagttcgagaccagcctggccaacagggcaaaaccccatctctactataaatacaaaaaaaatgaacaggcatggtggtgggtgcctgtaatcccagctactcagaaggctgaggcaggagaattgcttgaacccaggaggcagaatctgcagtgggccaagatcatgccactgtactccagcctgggtgacagagcaagactctgactcaaaaaaagaaggaaggaaagaaagagaaagaaagagagaaagagagagagagaaagaaagaaaggaaggaaggagaggagaggaaagaaagaaagaaaaagaaagaaaagaaaagagaaaagaaaagaaaggaagggaaggaaagaaaggaaaggaaggaaaggaaagagaagagttctgagacttgggcttgatgaaagacaagaaggaagaaaggaaggaaggaaggagagttctgagacttgggcttgattcccaccttgctatgtggtcatgggcaggccagtgtccctcttcgatatttaggggccctctctttgaaatagcgcatctgacagccccctcactctgagggctgttggaaggatctgggacatctagagacatgaaaaacacttcgtagatgcttcacttccattcatcagatcctggatgagggcgtataactcattccacaaactattcatggggccagcacaaaccccgagcagcccacgtcagatggtgcagacagacacaggcagaagatcctgccagcacatgtacaatgggcgcacgtacaacagacgaaggctgtttcactaacccattttcttagatggagaaactgaggcccaagaggagatgtgatttacccaaggccacacacccggcaactggcagagccaggatttgaacccaggtctgagggactccaactttgcttccctttccactgcaccttgtctgttaatgatgatgatgatcacgttcctcttcctatttccatcaaggctgcagttgtcaagattttttatcttcctgggccttgtggacactcagatgcatccagaccaggtcttttcatggatggaggagctgtctccctccttaaaatgacttcccattgctctgtggtggaggggaagtagcaaatcatatagcctcagggcagagctcccacctgctgacaccaaaaccccactgcactctttagcctccttctcctttcccatttactttcttttcttcttctctttttttttttcttggagatagagtctccctctgtcacccagactggactgcaatagtactatcttggctcactgcagcctctgcctcccggatttgagtgattcttgtgcctcagcctcttgagcagtggggattacaggcacatgccaccacgcccagctaatttttgtatttttagtagagatggggttttgccatgttggccaggctggtctcaaattttttacctcatgtgatctgcccacctcagcttcccaaagtgctgggattacaggtgtgagccaccatgcctggcaccttttccatttgcttttccatcttccttttctcccctctcacagctctccctgtatctgtgtctccctcaccatgtgtccaggagggtggtaatggaaccggggttgaggagggcttgggatactccagctggggtaccctgtttccacactaacttggggagtgatattgagaaagttccttggcttccctggccagggaggggtcatcactgcctggaaggaattacaaacccccgcttggtgaatggggtcattgagaggttgcaatgggggcggggccaggcagagtggaggcaggaaggcaatggcagagagcccctgggcagatggactagagctaggggcaggttcattttgggaagtggagaccaccactcagtatttacccacaagtcctcccttggagtattttgtcaccctatttctcagagaaagcagccaatggtcagaggagccaggattctggtccaggacatttttctgaagtgccaggtactgcacgtgataggcaaaggtggttctcgccctggccctgatgcgcagaggctctgtgactttgggctgctcactccatccctctgagccccatagtttcacccataaaatgagtagaatgataaaatccacccaacaggggtgtttcaaaccttagggtttccaatttagtgtgtctttccttatccaagagctgggagaggaaaagggtggagactgggagactgctaaccctagacatcatagtcagaaaaccctgggcccaaatacccactttgttacttcctgactgagcctttcctctcattgaaaactgagccaggcacagtggctcatgcctgtaaatcccagctactcggcctcacttgagaccacgtgtttgagaccagcctgaccaacatagcaagatccatctccacacaaaaaaacaaaaagaaaaccaccaagaaccaaaacattagctgaacatggtggtgtgtgcctgtaatctcagttactcaggaggctgaggtgggaggatcacttgagcttggaaattggaggctgcagtaagccgtgattgcaccactctactccaggctggatgacagagtgagaccgtgtttcaaaaaaaaaattaaagaaaagaaaaaaataaacaaacagggatatcccaccttcctcccaaggtggagagcagagacacagcaagtgtcagcaatgaaggtgatactcagggaaggtactcaggacaagagggacttttggggtggggggagcagttggggagagtgaggacagcaggggagcccccttcctacacccacccctctgtctgctcccttttattatttctgccccttctctttgtaggcaactggaattattttggctggggtgagcagcacagtaagtactcagcctgattgatgttctgggagttacatgggaaggtgggcaccttggtgatcccaaggcccctccccactaccacacagggaagcaaggagcctgtgacgagcacgtgggggccagagggctcagcaagacccctttcaagctttcctgtaccctgttcattagtgcctgtcttgggaggcctgccatctgctggggagtgggcaccgtcattggggtggggtggggggggttagcctggaggagtggacatttagaccaacaacctgcttgtctccagctgggcactgtgacccccgcaccccactccgccgtataacctcacctcctctcctgtagcccctgccttttggtcttcctatcttccttctccacttggaaatgtgtccagtgtcactcagagggtagtgggtgggcggggtctctaacagaacggcaggccagggacctcagggagatgcacacagggacctcagcaccccccaggtccacccacactcacacctcaccttccaccttcatttgctctcccagggaataaggcaagccaccccctccctaaattaaatgtccattttccttttcctttttttttttttttttgagacggagtctcactctatcacccaggctggagggcagtggcacgatctcagctcaccgcaagctctgcctccagggttcacgccattctcctgcctcagcctcccgagtagctgggactaaaggcgtccgccaacacgcccggctaattttttgtatttttagtagagacggggtttcaccgtgttagccaggagggtctcgatctcctgacctcgtgatccacctgccttggcctcccaaagtgctgggattacaggcatgagccatggcacctggccctaattaaatgtccgtttttctacctaacagcggttcccaacctttttgacacaagggaccagtttcatggaagacaatttttttatggactggggttgggggatggtttctggatgattcaagttcactgcatttgttgtgcactttatttttattattattattattacattatagtatgtaatgaaataatgatacaactcatcatcatgtagaagcagtgggagccctgaacttgttttcctgcaattagacagtcccatcttagggtgatgggggacagtgacagatcatcaggcattagattctcataaggagcacacaacctagatcccgcacatgcacagttcacagtagggttcacgctcccgtgagaatctttttttttttttgaaacagagtcttgctctgttgcccaggctggatggagtacagtggcgcaatctcgcctcactgcaacctctgcctccgagttcaagtgattctcgtacctgagcctcccaagtagctgggattacaggcgcgtgccaccatgcccagctaattttttgtatttttagtagagatggggtttcaccatgttggccaggctggttgtgaactcctgacttcaggtgatccacctgccttggcctcccaaagggctgggattacaagtttgagccactgcgcccggccttctatgagaatctaatgctgccgctgatctgacaggaggtggaactcaggcggtaatgtgagtgatggggagcaactgtaaatacagatgaaacttcactcgctcacccaaccgctgcccacctcctgctgtgcgccccagctcctaacaggccacagaccagatccatgccctaaagagttgctccctttctcccataccccgcctcttctagagaaatccagtcctctattctttctttccttctttcttttttcttttttttgagatggagtcttgctctgtcacccagactggagtatagtggtgcgatcactgctcactgcaacctccacctcccgggttcaagcagttctcttgcctcagcctcccgagtagttgggattacaggtgcacgccactatgcctggttaatttttgtatttttagtagagatggggtttcaccatgttggccaggctggtcttgaactcctgacctcaagcaatcctcccgccttggcctcccaaagtgctgggattataggtgtgagctaccatgcctggccagtcctctattttgaggataaatctgcctccttctctctccttcaactggggagtccttcactccttcctcatatcctggtggacaaacctaactccaggaccagtgaaactgttgacaaacactttggtccaccacaatttatcaaaaacaagttggttaaaaatcaacttaggccagccacactggctcacacctgtaattccaacactttgggaggctgaggcgggagggacgcttgagctccaaagtctgaaatcagcctgggcaacagagcaagactccatctctacaaaaaaaaaaaaaaagggccgggtgtggtggcacgcccctgtagtcccagctatttgggaggctgaggtgggagggttgtttgagcccaggaggttgggactgcagtgagccatgattgtgctactagactttagcctaggcaacagtgtgagaccctgtctctaaaaaataaatagattaaaataaataaataaaatcaattttgccaaaatgaatgcttggcagacagggcaagctcgataacaaccaacttgccacaaacgaacagtacggtcaaaagcaaagatagaccaggcgtggcagctcacaccataatcccagcactttgggaggccgaggtaggcagatcacttgaggtcaggagttcgagaccagcctggccaacgtgacgaaaccccatctctactaaaaatacaaaaattagccaggcatggtggtgcatgcctttaatcccagctactcgggaggctgaggcaggagaatcatttgaacctgggaggtggaggctgcagtgagccgagatcgtaccattgcactccagcctgggtgacagagcgagactctgtctcaaaaaaaaaaaaaacccaaaaaccaacaaacaaacaaaacaaaacaccaatgcagctaaagctgatagataattgggtcaaaaaggaaagacaattgaaccgaaaacagaccgttgggttaaaacaaaagtggttgaaaatagccagaagcaggcaatttagtcaagagctacttagtagaaagcagagcctgggcaaaagcaaaaagaatccaactcaaagtaatttacccttcataagcagataatttgtcaggaaaaaaaaaaactgggtaaacatgtgcacagcctcatgcaatttggctggaaacatctcagcccggtcaaggacaattggatagaaagaatgctggccggccgaggtggctcacggctaatcccagcactgtgggaagctgaggcgggaggatcgcttgagcccaggagttcaagatcagcctgggcaatatagggagatcccatctctacaaaataataaataaataaaattagctgggtgtggtggtgtgtgcctgtggtcccagctactgtggaggctgagatgcgaggatctcttgagcccaggaggtcgaggtttcagtgagttttgatcgcgccactgcgctccagcccaagtgagagagaccctgtctaaatgaatggatgaatacagcaaaagtctgaaggtttcactcattgctctgagattttggggtctgggggttttttcatttttttacatcctcttccccttacccgtacttctcatgttttcttcatggactactttttctttttttctggatacagggtctcattctgacacccagactgcagtgcagaggcgtaatcatagctcactgctacctcgacctcctgggctccagcaatgctcctgccataccctcccgaatagctgggactacaggcgcccaccaccacgcccagctaatttttaaatttttttaaagagatggggccttactatgttgcccaggctgatcttgaactcctgggctcaagtgatcctcctgccttggcctcccaaagtgctgggattacaggcatgagccactttgcctggcccatggactaggttttactttacttttattttattttattttttggagacagggtcttgtgtcacccagcccctggagtgcagaggtgtgatcttggctcacagcaatctccacctcctgggttccagagattctcctgcctcagcctcccaaggagctgggattacaggcacatgccaccacacctggctaatttttgtatttttagtagagacagggtcttggtatgttgcccaggctggtcttgaactcctggcctcaagtaatctgcccgcctccgcctcccaaagtgctgggattacaggtgtgagccactgtgcccggcctttgctttacttttaaaataaagataactttatcattctttttagttaaaaaattaaaaagattgcattattgaaatcttttttttcagaaggtacagaaaagaataaagaagaaaatgtacaatccccaattatgccaccacccagacatgttgcttttagaattggaatttttttttttaggatttagaaaacaaactgttcttttttctaaggaaaccaaactaaaccaaaatatcttttagttcttattaaacatgaagtttggcaactctaccacattccattttagcaatagattccaagtgtgtggtggctttgccaagctaagaatctaatcctttttgaaaaagacagaaccatgtctcagcatcttcttggttcttgcatatttgttaagttcaggtctggggtcgtcaccctcagatatcaggaaatctctaagggttaaagagcgttccgtccactttgaactcctgatcttcttccaacttccccctgactgtctgtgtgactcctgttatgggaaactaactgctcagtggaaaaaaatcccatgtcattttcagagatcctgaccttcagcaaagttgttcttcacatttgagctgaaggatgccctctactctgtccctgttttcttcacattgtaggtcctaccctagcccctagactttaggtccaatttgacccacataaagcaaagcagggttttcacctcccttgttctgaagcctatatctctattaacatgacccacaattctttatccatactagtaaaaaattctcttcttcggtagcggcaccgtaagtctgggaaattgtattggctcccatcatgtgcactctctcttcctcaccctcttcccataccgcctctctcttccagacgatgaccccgacagtgcagtggatgatcgtgacagtgactaccgcagtgaaacgagcaacagcatcccgccgccctattatactacgtcacaacccaacgcctcagtccaccaatattctgttcgcccaccacccctgggctcccgggagtcctacagtgactccatgcacagttacgaggagttctctgagccacaagccctcaggtaggtgctgcggagtgcagcatgcatgtgggtcctgctgtgtctcctggagtggagagaggggtacggggctggacagagctggaggtggagttccagaagggcagaattcacccatccaggagggcagaattcacattttcttgtgggaattaaccatttttttctttttttttttcttttcttttttttttagacagagtcttgctctgtcacccaggctggagtgcagtggcaccatttcggctcactgcaacctccaccacccagactcaagcgattctcctgcctcagcctccccagtagctgggactacaggcacaggccgccacaccaagctaatttatttttattttttgtggagatgggggtcttgctccattgcctgggctagtcttgaacccctttttattcctatagcatcctcgaggctggccagggaagagggtctcaggcgctaagattggaggaggtatctaatcgggaaatgataaggttcgttgaatgactaagtgaatggttagaagagggctgagtggtggcccctatgtccccctgcctgtatttagacagagacagatattgctgttgacgttgagcacgatcctgggttcacataagcagcacataacagagggcctgacctggccagacagtggggggcatttgcacaagtaagtgatgtttcagtgggtaccagagggtgggtaggagtttgctagataaagcagacaaggaagagaccacggcaagtgcacaggtttatggtgttggagagacaacgaggtggccagcgtggccggaatggaggaggcggggagaagtggagggaggtatgcagggggagtttggagcgtatgggccacacagggctagcacagattttattccaaggcactagggagccatggtaggatttagagcaggggagggaggtgattggatttacaattccctgtggcttccaagggaagcaggaactgtggagacagcatctggtagagacagcagaggctggcctgggttggggcccggggtacggggaagtggatgcatttcccatactttttccaggtggaggacaggagacctgctgcggggctgtggtgatggcgctgaccctgagttcccagcacagtcaattgcctgttccccacagaccgcaaatgccacaaaagtgggaatttttttttttttttttttttttttgagacggaatttcgctcttgttgcccaggctggagtgcaatggcatgatcccagctcactgcaacctccacctcccgggttcaagtgattcttctacctcagcctcccgagtagctgggattacaggcatacgccaccatgcgcagctaatttttgtatttttggtagagacagggtttcaccatgttggccaggctggtcttgaactcctgacctcaggtgatctgcccacctcagcctcccaaagtgctgggattacaggcgtgagccaccgcacctggccaaaagcggggatttttgtcttttctgatcatggctgtgttttccagcccctagagcaggacctggcacatcgtaggtgctcagtcggtgatgagtcaatgcctgtgtgactggggctcaggtgggcagtgactcggtaccccagtccctgaaccctgttccatccccacagccccacgggtagcagccgctatgcctcttccggggagctgagccagggaagctctcagctgagcgaggacttcgaccctgacgagcacagcctgcagggctccgacatggaggatgagcgggaccgggactcctaccactcctgccacagctcggtcagctaccacaaagactcgcctcgctgggaccaggatgaggaagagctggaggaggacctggaggacttcctggaggaggaggagctgcctgaagatgaggaggagctggaggaggaggaggaggaggtgcctgacgatttgggcagctatgcccagcgtgaagacgtagctgtggctgagcccaaagacttcaaacgcatcagcctcccgccagctgccccagggaaggaggacaaggccccagtggcacccaccgaggcccccgacatggccaaggtggcccccaagccagccacgcccgacaaggtgcctgcagctgagcagatccctgaggctgagccacccaaggacgaggagaggtaacaggacggggccaaggggccagaggggctgccacaaggtcacagggtcagcagggctatgatggggtcagcgtggacctgggaagttgctggggctgaagttgtcacaggctcttgggtttcttaaagggatcagaggtgacagggcagagtagggaggtcaaagagggttcaaggggccgtgaaggagacttagagtttgtgatcttagtggttgctggggtcggagaggtcaagatcctgggcaaatggggggccagaggggctgggctggtgaaaaggaagccgaggaacagtgaagtgtcacagaagcattgggtgtgtgggaaggggtgaggggcactgaggtgggccaggggactcacgtgggtcctaatgtctctgaggggtcagagataccatggggagctatgcatcacttgcacagctggagggtcaagggaagttcaggggtcacggagagccagcccagagcctcatagcgttccctgcctcagtttcaggccgagagaggatgaggaaggccaggaggggcaggactccatgtccagggccaaggccaactggctgcgtgccttcaacaaggtgcggatgcagctgcaggaggtgagtgacacgcccagccatgcccctgccacacttagccaggccacgcccaatggcaggcccacacatgttttggccacacccacacctatattggccacgcccaacaccccacccgtacccaagcctagcctgggcatgcccagtgcagtgcccacactgtgcccatgccccagccactcgagcccttccctggccccaccctcattcagcctggcctcacccaatgtcaccgatgccccacccactctgacccttccttagccacatacacacacagcccagggtatccccatggcccgtccacaccagcctggctatgctaactcccaaaccatgcaccaagtctggccccacacatccccagcccagcctccttcccaatgtcagcctggggtttctagatctagagggaggagagaaaactagggctgaaactgggctgaagtcatggttagggatcaaggtcagggttagttcagccatcaaagatcagaggtcagggttagaattggtgttaggcaaaggggtcagtgcttagggccaaattggaggtcattgtcagggttagggaaaggtctggggccggctcagtaggggagtaggaatcaagggaagcaatcagcatcaggggcaagctgactgtttagatgggcagcagggttgaggccattcgtttattccttcattcagctcaccctgggctggggacagctgtgttgctcttcagagttaccctccaaactgcagtgggattggcaggaggagattctaaacagactcccaaaggtttagaccatcaaatatcagagccacaaaattaccaaacgaaatttcttaacagttttaaaatagaaatctattttttgactcagcagtacatacatatggttctaaatgagacaggtggaagaggacacagtgaaaaggctgttggataacttccactaggtcaagaaattaaattgaaaaaatagcagctactattggaactatgtgatatacaagaaaaacaaactatggaactagtaatatgacaagaaaaagacacatggaaggctctctgggtttcataggaaaagcataaaactaatccaaggcaatcaggaaaactccctggaggagatgacacttaaggagaagtgatggccgggcgtggttgctcaagcctgtaatcccagcactttgggaggccgaggtgggtggatcacgaggtcaggagatcgagaccatcctggctaacatggtgaaaccccgtctctagtgaaagtacaaaaaaattagccggctgtggttgcaggcgcctgtagtcccagctactcgggaggctgaggcaggagaatggcgtgaacccgggaagcggagctggcagtgagccgagatcgcgccactgcacaccagcctgggtgacagagcgagactccatttcaaaaaaaaaaaaaaaaaaaaaaagagaagtgatatccaaaatatttatttcaacaatatttcaggagctcatgcctgtaatcccagcaatttgggaggtcgaggcgggaggctcacttgcactcaggagtttgagaccagcctgggcaacgtagtgagacctcatctctaaaagaaaaaaataaaaaatatttcagagccggatgcagtggctcacgcctgtaatcccagcactttgggaggcagaggtgggtggatcacctgaggtcaggagttcgagaccagcctggccaacatagtgaaaccccacctctactaaaaatacaaaaaattaattgggtgtggtggtgggcacctgtaatcccagctactaggaaggctgaggcaggagaatcgcttgaacccaggaggtggaggttgcagtgagctgagattgcgccactgcactccagcctgggcaacaaaagggaaactccgtctcaaacaaacaaacaaacaaaatatatatatatatatttatttcaggagctgagtgtggtggcttgtgtgtgtggtcccagctactcaggaggctgaagcaggaagatcacatgaggccaggagttcaagaccagtctgggcaatatagcaagaccctgtctttaaaaaaaaaccaaacaccccctcaatatttcagaacagaagagtgctgcctgtgttcctcatagggccacccctccccccatgttaaccctttagttacaagatggagggaaggtaggggctgtggaccccacgtctatgctgagacccgaatgataaatagaggctggttggctgcagaaggtgggaagaggtacaagctgaagtcacaactcctggaaagagcccgaggcaagagagcagatgaacaagtgagactatagggggtttagggaataatcaatgaagagactgaggtccattgaggtggttgaaagagaagagcttctttctcccccagcccatcttacagatggacaaactaaggcccagagatagccacggagcttcctaaaatcactcagccaggactaggacccaggccatctgactcccagcccagaggggagtcagaagtgggtgtggagcctgctctggggaggggagggacagccacactgaccatatctgtctgtctgtcctgcaggcccggggagaaggagagatgtctaaatccctatggttcaaaggcgggtaagtaatgaaactgtgagcggtgggaggaagatttgaaccccaagtccaaggctggtttgcgcctgagcctcagcccagagaggaggaggaggggttccatttagacaggggacagattgagcttgggcaaaatacgtcactttcataaggcacacagccatacgcagacacaaaagacagtaatctttgaagacagggcggggtgcggtggctcatgcctgtaatcctagcactttgggaggccgaggcgggaggatcatttgaggtcaggagttcgaaaccagcctggccaacatggtgaaaccctgtctctactaaaaacacaaaaattagctgggcatgctggcaggcgcctgtaatcccagctacttgggatgctgaggcaagataattacttgaacccgagaggcagaggttgtagtgagctgagattgcaccactgcactccagcctgggagacagagcgggacactgtctcaaaaataaacaaacaaataaataaataaataaatgtaagataaagcagacactatgaggaactagacactattgggaaatgtacactatatatttgtaatcctggagcaaaatttttgcgttgattctatttttaaatctctttgattattgctacagttgtgggctctttaattaaagatagttgtttagtcttcagtggagaatgtggtcatgtctaacctcttatgttatggattttcaggttagaggatgcacaagatattttaaaaatatgctcaggttttaaaatagcagcacgatagtgaccttccttgtacgtccttggcaaacaggcagggagacagcagctgggactcctaaataaatgagcaggtaccctagctagagagccttggatgcgggtcctgaaatgcggattcctgtgcacgtgatttatgaaggatgtgctctcgggagaaacctgtcagacaaggggaggctgccgagaaaagatgtggtttaggagtctctaagcctcagttggctcctgcagaaagctttgtaggttgaatagccctgcagggcttgtctggagtcattggctgcaggcacctatctcactggccagtgaaaaccttttcggggccaggcttggtggctcacgcctgtaatcccaacactttgggaggctgaagcaggtggatcgcctgacgtcaggagttcaagaccagcctggccaacatggcaaaatcccgtctctactaaaatatacaaaaaattagccaggtgtggtggtgcatgcttgtaatcccagctatttgggaggctgaggcaggagaatcacttgaggctaggagttcaagaccagcctgggcaacatagcgagacccccatctctacaaaagaatttttttttaattagctatgtgtgggccgggtgcagtggctcatgcctgtaatcccagcactttgggaggcctaggcggttgatcacctgaggtcaggagtctgagaccagcctggtcaacatggtgaaaccccatatctacgaaaaatacagaaaattagccaggtgtcgtggtgcgcacctgtaatcccagctacttgggaggctgagataggagaattgcttgaacccaggaggcagaggttgcagtgagccaagatcataccattgcattccagcctgggcgacagagcgagactccatctcaaaaaaaaaaaaaaaaaaaaaatttgctgggtgtggcggtgtacacctatggtcccagctactcaggaggctaaggtgggaggattgctgtagcccaggaggtggaggctacagtgagccgtgattgtgccactgcactccagcctgggtgacagagtgagatcttgtttcgaaagatggctgggcatggtggctcacgcctgtaatctcagcactttgggaggccaaggtgggcggatcgcctgaggtcaggagttcgagaccagcctggccaacatggtgaaagcttgtttctactaaaaatacaaaaattagccaggcgttgtggtgggcacctgtaatcccagctacttggggagctgaggcaggagaattgcttaaacctgggaggcagaggttgcaatgagccaagaaaggtttcatctatattttattttatttttgatacagagtctcgctctgtcacccaggctggattgcagtggcgtgatctcgactcactgcaacctctgcctcctggttcaagcaattatcctgcttcaacctcctgagtagctgggactacaggcatgcactaccatgcctggctaatttttgtatttttagtagagacggggtttcaccatgttggtcaggctggtctcgaactcctaacctcaggtgatccgcccgcctcggcctcccaaagtgttgggattattacaggcgtaagccaccactcctggcctcatttatattttagtatattatttagatttgccttaattcacgttttcattcaaggtgggcaattacatcatctccccatttttcagatgaggagggtgaggccgggtgtctccatttcttaggactgctgtcacaaagtaccacagacgggtagcttaaaaccacagcaatgtattctctcacagttctggaggccagaagtctgaaatcaaggcattggtagagccatgctccctctgaaatctgtagaagagaattcctcccctgcctcttctagcttctagtttgcttgaattccttggcccccgagtattggtttgtagatacgtcgctttctgcctctgctgtcacagagccaccttctccccatgtatctcttcttctaaggacaccagtcatattagattaagtgtctaccctactccagtatgaccttatcttaactaattacatctgtgacaaccccgtttccaagtaaggtcaccttctgaggtagtgggggttagggcatcagcgtatcttttttttgagggacccaattcaaccccttaacacctgggggaggttgaatgttctccccagggctctatgtgaggaatagggacatctgggccctcagtgtccctctgtgtctttcagcccagggggcggtctcatcatcatcgacagcatgccagacatccgcaagaggaaacctatcccactcgtgagcgacttggtaagcaccctcgccctttactccctgagcagagcaggcctgctataagcagtgcacaacctgtggaactgcccatggtcaacctggggttgggggccagctaggcattctctgagactaatgtagtctgatttctacccccatgtgctgcgtggacacttcaggccatggtgagtgatggcgacatgggcctcttgggatcttctccccaaactcccccactgggatcttctaacaggcccccaattcatggattatgggggaaccttgccatgtcccactgtgttggatgctgtgagtcaggggtgcggggctgctcactttccagggtcccttctaactcaaagcctctgtcacctcctaattctttgttgggtctggcccggatgctgtcggtgacctgtttccaacttgcggttgtggctccaaaatgtggctgctggccccatccgtggctgtgaactctcctggtggtgatctcatggatgtcaacccccccgactccctcttctgtgacctccccagtccctggtccagtccaggaaagcgggcatcacctcggccttggcctccagcacgttgaacaacgaggagctggtgcgtggggcacctctttttccccgggtcagggatggactgggctaggagcttctggaattgtccaagcctctgtgggtccccgggaagaggaagggtgtgtgtgtgacacagactggcagaaggcagcgtggattccgacagcgtggaggcaggggagggcctgggactttaccgcgctcagtgatggggcggaatggggcaggacagggacagcgccaggttaggcgcccccaaaccgcaccccatccctccctgcagaaaaaccacgtttacaagaagaccctgcaagccttaatctaccccatctcgtgcacgacgccacacaacttcgaagtgtggacggccaccacgcccacctactgctacgagtgcgaggggctgctgtggggcatcgcgaggcagggcatgcgctgcaccgagtgcggtgtcaagtgccacgagaagtgccaggacctgctcaacgccgactgcctgcagcgtgagcgcagggcctgagcgcagggccacgggttggcgtggggagccccggggcttgcatggcggggaaaggctgaagggcaaggcgatgggtggggcaccatggggcggggcaaggggcggggcgtcgtgaggcaggggagggactcgctgaaagggaggggtggggttaaaggcgcaggactccctggtggaagggctagggggtcgaggggtggggaaagaagctgtgagggtgtcagagaggggtggggcagggctcagggactagctaggttgtgcaaaggacaggcttagtgagaagaggcagctcccctggataaaatgggttagctaggggtagctctgagaggaagaggggctcagagagggaaggggttcagactgcgagaggactgtggagggggggattggaagggggaggggactcagaggaggtgggaccaagagaaagggaggggtctgagagatggaaggggctcaggaatgtggaggggactcgcaggggtggagatcagagacgaggaggggattcagaggagtggggctcagagaggcagcgggactcagaggggtgggactcagagagggggcggagattcagaggggtgggacgcagagggggcggggactcagaggggtggggcttagggaagaggccttagaggggtggggctccaaaaaccagtggggactccaaggggtgcggggcagagaagggcaggacgcagggacatggcgactcagaggagcatggctccgagaggaggtggaagggtgaagggtctgggtggggggtacagaaagcaggtaggaaaccggcttcagggggtgacacctgagtccccccggttgatgagtaggggcggggctctcgccttggtgaggggccactatgcagggcgcgctggggtcagcgccggcctcgggcgtcctcaggggctgcggagaagagctccaagcacggggcggaggaccggacacagaacatcatcatggtgctcaaggaccgcatgaagatccgggagcgcaacaagcccgagatcttcgagctcatccaggagatcttcgcggtgaccaagacggcgcacacgcagcagatgaaggcggtcaagcagagcgtgctggacggcacgtccaagtggtccgccaagatcagcatcaccggtgagggggcgtgggccgccatagggcccctccttctccaccctctgagacctgtctcatgccctgtcccatggcctggtccctctcctttgcagcgcgcactcactcggtcgggtgcattccatctcatctccgtgtgtgcacgcatatggggggacatgcgtgcctccaaacgcctgttcatggcactgtatctgggtgcgtcttggatggtgccctccagaatgagactccaagaagaggaattgagggtgcatggtttatctggaaagtgaccccagaaagtcctggtgaggggcaaggacttgagacagggatggaaggagtcctgaaggagatgccgttgagcagacaatgctgtgggcaagggggtcagcccatcctggggccactggggacaatgtcgagcatgcagctcagtgtggccccacttaggggcgaggatactggcttttctccacacccagcctcatgtgggtttccccataaacagacctgaggatgaggatttcaggttatgtgggttatccaggaagtgaccccaggacggagctggggtggtaagtcagggagggaaggaaccctgcagggggcaccaacgagcaggagatctcggggggcaatgggttcttgtaagtgtctgacctcagggagttcacacctgagagaggtcctacccatgcgcaaggcagctggggcaccttcccatccttcatggtttggggactccttcccagcactttgggaggctgaggctgaggcaggcggatcacctgaggtcaggaattcgagaccgacctggccaacatggtgaaaccccatctctactaaaaatgcaaaacgattggccggatggggtggcacgtgcgggtaatcccagctacttgggaggctgaggcaggagaattgcttgaacccgggaggcggaggttgcactccagcctgggtgacgagcaaaactctgtctcaaaaacaaacaaacaaacaaacaaacacacaaaaaacctctctggcaagcccagcgtgccctgccattgctctccagccatgctgcaggtgtcccaattatcagcctgcagcgtgtggcagtgactgtccccagcatgcctcgcttcttgagtgcacacctgtgtatgccctctgtgtcttccagtggtctgcgcccagggcttgcaggcaaaggacaagacaggatccagtgacccctatgtcaccgtccaggtcgggaagaccaagaaacggacaaaaaccatctatgggaacctcaacccggtgtgggaggagaatttccacttgtaagtgcctggctgggtccctggccccatgtggggcatcctgctggggcagccaaaagagggctccaaggacaggactcacactggctgcctgacccctgcctctgcctcctcctcccgccacagtgaatgtcacaattcctccgaccgcatcaaggtgcgcgtctgggacgaggatgacgacatcaaatcccgcgtgaaacagaggttcaagagggaatctgacgatttcctggggcagacgatcattgaggtgcggacgctcagcggcgagatggacgtgtggtacaacctgggtgagagaagctgggttctgaagcgggtggggacgggtcccagggatccagccagagcatggagcccacgaagagcagagagatgtgttctcaggaggagtttggtcgaggagcataatctgatgggggaggcagggtctaggagcccagtttgatgggagcaggaagcacccaggccaggagggtgagcagagcccaggaacctcttagttcagcttaggagggagggtggggacagaatctccatgttctagtctaatgggggaggcaagaagcaagaactgggaatcctagtctgaggggagagacagagacctaggaactaaatctaagaaagaagattgagctttaagaatccaggctggggccaggtatggtggctcacgcctgtaatcccagcactttgggaagctgaggcaggcagatcacatgaggtcaggagttcgagaccagcctggctaacatggtgaaaccccgtctccactaaaaatacaaaaattagccaggcgtggtggtgggtgcctgtagtcccagctacttgggaggctgaggcaggagaatcgcttgaacccaggaagcggaggttgcagtgagctgagactgcgccactgcactccagcctaggcaacgagagcaaaactcccactcaaaaaaaaaaaaaaaagaatccaggctgggggcgccgggcagtggctcacatctgtaattaatcctatcactatgggaggctgaggcaggccaatcacttgagtccaggagttcaagaccagcctgggcaacatagtgaaaccccatctctataaaagatacaaaaattagctaggcagggtgacactcacctgtggtcccacctactctggaggctaaggtgggaggatcccctgagcctgagaggtaaaggctgcagtgagctgtgatcacactgctgcactccagcccagggaacagagtgagaccctttctcaaaaaacaaatatggccgggtgcagtgtctcacgcctataatcccaacagtttgggacggctgaggcaggcagatcacttgaggtcaggagtttgagaccagattgtccaacatggcgagatcaagcccctgcactccagcctgggcaacaaaggaagactccgtctcaaaaaaaaaaaaaaaaaacaaaagaaaaagaaaaaaaaaatggaatccaggctgggcatggtggctcccacctgttatcccaacatattggttgggtggctgagctgggagggtcacttgagcccaggagttcgagaccagcctgggcaacataacaaggcctttgtctccattaaaaaaaaaaaaatagctgggtgtggtgatgcgtgcctgtagtcccagccacttgggaggctgaggtggaagcatcatttgtacctgggaggttgaagctgcagtgagctatgatcatgccactgcactccagcctgggcgatagagcaagactctgtgtccccccgaccccccaccacaagaaaagaatccagtctaaagagggaggtattgtttgggaatcctaatctgagatggctgctacagatcaaagaaccctgtgtaaggaagttgagtagaatctggggagtccaatctaatggaggaagcagggtgtatgagcctaatctgagggggtagaaaggacccagcctgagagaggtgagcagagcccggaaacctcttagattggaggacatctagatatcccattctgatgggggaggtgggagacaagaccagggggtcctagtctgaggagagaggcacagacccaggaacagtgtctaagatgtgtagtctccggggagcatgatctgatgggggaggcagggcctgggagctcagactgggaaagaagtggggcctagggctgctagtctaaggagggaggcacatagccaggaacttaatctgagtgaagaagcaaggtctgggatccttgtttgaaggaagagacagggcttaaggaattctagcctaaacagggagactcaagcctagggagccaatcagaagagagacaccaaagccttagtttccggaagtctgggaggactacagaatcgtgtatctattaaaaattgccttgggaggccgaggcgggcggatcacctgaggtcaggagttcgagaccagcctggccaacatggtgaaacctcgtctctactaaaaataaaaaattaggtgggtgtgatggcacatgcctgtaatcccagctactcgggaggctgaggcaagacaattgcttgaactcaggaggtggagattgcagtgagccaagattgcgccaccgcactctaacctggaccacagatctcaaaaaaaaataaaataaaaaaaaatttgcccatggctggccgggcgcggtgactcacgcctgtaattccagcactttgggaggctgaggtaggtggatcacctgaggtaaggagttcgagaccagcctggccaacatggtgaaaccccgtctctactaaaagtataaaaattagctgggcacggtggcaggcacctgtaattccagctagttgggaggctgagacaggagaatcgcttgaacccaggaggtggaggttgcagtgagctgagatcgtgccactgcactccagcctgggtgacaagagcaagactccctcttaaaaaaaaaaaaattgcccactgctatagtgggaagttctgacactgtcttctttttctgccctgcagacaagcgaactgacaaatctgccgtgtcgggtgccatccggctccacatcagtgtggagatcaaaggcgaggagaaggtggccccgtaccatgtccagtacacctgtctgcatgaggtgagggtcattgctcggcccctcccatgccacttccactcaccattcctgcctgcccagctcttcctctttctggccacaccatccacactctcctggccctctgagactgcccgccatgccattccctttacctggaaaactcctccctatccatcaaagtccagattcagggtcacctcctctgggaagcccaccttggcctccaggttgactctcactactcatcatcaggttcttccttctattccagccctaaccactcaggattgggccgtttgtgtctgggtatgtctcttccagctgcctgggtttcctggaaagaactcttatccccaggaactagtttgttgaataaatgctggtgaatgaatgaatgattgaacagatgaatgagtgatgagtagataaaaggatggatggagagatgggtgagtacatggatggatagatggatgagttggtgggtagattcgtggctagatggatgatggatggatggacagatggatggatatatgattgaactattgaaagtatagatgtatggatgggtgaatttgggggtaattgttagatgatggatgagtatagatgaatgatggatggataacttgatgagtggatagatagattgctggatagatgattgactgggtggatagatgaaatgttggatgagcagattaagttgtattggatgggatggatggaagtgtggttgagttattagaaggaagattgagtagataggtgaatttgttgatagtcagatgggtagataggtagatggatggatggatggatggatgtataggcagatggacaaatggatgaatgggtgggtggatgaatggaaggatgtgtggttgaactattgcaagtattgataattgggttcataatttctgaatatttagatggatggttgtgagtggctggtggacagacgaaaaatggatggttggataaattgatgggtggatggatggttggttgtatgaaagaatgaatgattgggtaggtggattaagttgcggatcaatgtatgggatggatgaatggatggatggatggatgtgtggttgaattactgaaaggttggaagagtggatgggtgaaatttggggtagttagatgggtgggtgtgtggatggataaaagagtagatgaatgaattaatgaataaacaggcagatggatgatgtaagctgccccagaccctgggacctctgacccccggcgaccccttgcactctccatgacactttctctcccatggtggcagaacctgttccacttcgtgaccgacgtgcagaacaatggggtcgtgaagatcccagatgccaagggtgacgatgcctggaaggtttactacgatgagacagcccaggagattgtggacgagtttgccatgcgctacggcgtcgagtccatctaccaagccatgacgtgagactgcaggctggggtgcaggaaacaagagggaggtcaccaagtgggcactggcaggtctggggtgggagggattctcagggggaagacccagagaggaagtgggcgtggtggtggtgggttccgtaattcccctggagatcaggagagcgctgtgattgacacctggagtgacatggaagagagggaagacttagaagcagagatagaggctgggcacagtggctcaagcctgtaatcccagcattttaggaggctgaggtgggcggatcactccaggtccaggagtacaagaccagcctggccaacatggtgaaaccccatctctactaaaaatacaaaagttatccaggtgtggtggcttgggcctgtaatcccagctactcgggaagttagggtgggagaattgcttgaacctggggggcaggggttgcagtgagccgagattgcgccactaaactccagcctgggtgacagagtgagactccatctcaaaaaaaaaaaaaaaagaaagaaagaaaaaaagaagcagaattagagcaactcaaatggatataaagatggaggggagaggagatgcggagacccaaaggacagaatcaggcaggggatggtttaggaggtgacagagacccactcacagatgctatcttggaggcattctaggggggatcttggtccatcctggctggacccctggcctagtgcctcctgctccctctctccagccactttgcctgcctctcctccaagtatatgtgcccaggggtgcctgccgtcatgagcaccctgctcgccaacatcaatgcctactacgcacacaccaccgcctccaccaacgtgtctgcctccgaccgcttcgccgcctccaactttggggtcagtcctggggactgggattggagaattagggagagcccaactttatgccggtcagatctgatgtgacttctgggtccccagtctagacctgattgctgtgtgactttccaccagtcacttcccgtctctgagcctccatttattcctctgtagaatgctatagaatggaggtcgggcgcagtggctcatgcctgtaatcccagcactttgggaggccgaggctggagaatcacttgaggccaggagttcgagaccagcctggccaacacggtgaaaacccgtctcttctaaaaatccaaaagaaaattagctgggtgtggtggcctgtgcctgtagtcccagccacttgggaggctgaggcaggagaattgcttgagcctaggagtcggaggttgcagtgagctgagactgcgccactacactccagcctgggcaacagagcaagactctgtctcaaaacaaaaaaaaaaatgccatagaatggaaatggacattatgagggtggtggatgaggtatacttactgtacagtaggcgctcagccactatggcggccatgtcctgcctccatccatcctccctcctccccttcctcctcagaaagagcgcttcgtgaaactcctggaccagctgcataactccctgcggattgacctctccatgtaccgggtaggaagtgtgtgcatgagaatttgctcaccccacgcacatgtgtgtgcctggaggggaaagctaccagcaggtgtgtgcatgggaggacccatcttcgcatgtacgatgtgttcctccagcatgtgtgcacctgcatgggcactacctgccgtaatgtgcttggtgcatccaagcagatccccagttgcttcgaggtgctctaatcaacccccagcctgaaaccggggagcctttgtatccccctgaaaagcagtctcccatcctccccacgccttcttccataaccccacatctcttcctgctcccaacagaataacttcccagccagcagcccggagagactccaggacctcaaatccactgtggaccttctcaccagcatcaccttctttcggatgaaggtaggaaaggatccagttgcctttgctctccaaggagggttctctaggatccccagctcccaggacaagtgacattcctcctggagagtggcagcctttctcagtaaccttttcctttcataccacttcatttccttaaacccaaaatgactcgcagtcacttcctggggacctcctgtcacagctgtggccgcctatgcctctctccctcccttcaggtacaagaactccagagcccgccccgagccagccaggtggtaaaggactgtgtgaaagcctgccttaattctacctacgagtacatcttcaataactgccatgaactgtacagccgggagtaccagacagacccggtgagactccagatgggtcagaagggaacagtgatgccaactagacacaggcttcagtcccagccctgccccttcccgagggatttaactcttctgaacctcagtatcttcttctataaaatggggtcattaacccacatctcaggattagggagaagagttcatgagctgtaagtttagataaaatatagtcggcactcagtacatttggttgcgtagttgagtttggcataaaaaaaaattttttttttttgagataaagtttcactcttgcttcccaggctggagtgcagtggtgtgatctcagctcactgcaacctctgcctcccaggtttaaatgattctcctgcctcagactcccgagtagctgggattacaggtgcccaccaccacacctagttaattttttgtatttttagtaaaaacggggtttcaccatgttggccaggctggtctcgaactccttgacctcaggtgatccacctgcctcggcctcccaaagtactgagattataggcgtgagccaccactcccagcctggcataaaaatttatgtctggcatacagtcactgttcagtaaatgttgagttgaattgaatttatttatttattttgagatggggtcttgctctgttgcccaggctggagtgcagtgatgcaatcatggctcactgcagcctcgacctcccaggctcaagtgatcctcccacctcagcctcccaagtagctgggactataggcacgcaccaccatgacaggctagtttttgtatttttgtggagatggcatctcactatgttgcccaggctgatctcctgggctcaagcgatcctcctgcctcagcctcccaaagtgctgggattacaggcatgagccaccacctgtaaggagcttatagcctattatgagggaaagatgtacaaactggaaatttacaaacagggatggttagtattgagatagtgggatctcaggaggctgtgggagctggaggcagcccctacccaggttctgataggatataacacataagctgtgttcagttcaatttgatttcattctgttcctttacattcagttgactagagttggaatcagtctcactctcatttgaattgagttgaggtgaactggattaaattaggctataaggagcttatagcctattatgagggaaagatgtacaaactggaaatttacaaacagggatggttagtattgagatagtgggatctcaggaggctgtgggagctggaggcagcccctacccaggttctgataggatataacacataagctgtgttcagttcaatttgatttcattctgttcctttacattcagttgactagagttggaatcagtctcactctcatttgaattgagttgaggtgaactggattaaattagattgtttagttcaaccataatcagtttagttatatttatttctatttggttgacttaagttaaaattgttcttgacggccaggcacagtggctcacgcctgtaatcccagcactttgagaggccgaggtgggtggatcatgaggtcaggagatcgagaccatcctggctaacacagtgaaaccccgtctctactaaaaatacaaaaaaattagccgggcgtggtggcgggcacctgtagtcccagatacttgggaggctgaggcaggagaatggtgtgaacctgggaggcagagcttgcagtgagctgagatcgcatcactgcactccggcctgggtgacagagcgagactccgtctcaaaaaaaaaaaaaaaattgttcttgacaaattagtgagccaggctgggctcagtggctcacacctgtaatgtcagcactttaggaggctgaggcaggaggatcccttgaggccaggagctcgagaccagtttgggcaacatagcgagaccctatctttgcaaaatatacaaaaattagccaggtgtggtggcgcacctgtagtcctggctactttggaggctgaggtggaaggatcacttgagcccaggagttcgagtctatggtgagccatgattgcaccactgcgctccagcctgggtgacagaatgagactctgtctcttgaaagaaaaaaaaaaaaaatagagagaagaacaagttggttgattgcattgagttttattgagtacaaattcattcatttccatttagttcatttacattcaagtcaagttgttctcaactgggttaaattgtcttgagttaggatgaactgggttgttggattagatgcaattgatttcagttgaattgggttgaattgggctaatttcagctgattatattcatttccattgattaacaaaggtgggttgaattgccctgcgtatgttcagttgggtttagataggtagaatcggattgggttgacttgggtagagttgagttcgagtcgatttatttccattattttgatttgggttgatgttgatcttggacaagttgattaggttcaatccaacggaattcatttgagtttaattcaatccagttaggttgaattgcactccattcagtgtgattggcccaagttcagttccattgatttaactcagaggaagaacttacttccgttaagctaagtgggcttaatttgcattcatttcatttccatttggtttagtggagctgggtttgttcaactaaatttggtttcatttatttccattcacttttagagtggagtctaaaaatcttaagctttatcaagctgcattgacatgagctctgtttgggccagtttatgagttcaattcctctctatatagatttcttacctgaaccatacacatgatgatgggatgcattcctctaaaacctcttgttcttcagtaataaactgaccgaggcaccaacctctggaccccctataaccgaggtctccactgtccatttcaggccaagaagggggaagttctcccagaggaacaggggcccagcatcaagaacctcgacttctggtccaagctgattaccctcatagtgtccatcattgaggaagacaagaattcctacactccctgcctcaaccagtgagttgtgtatctgtgtagttaattatctgggtgtcatcgtgtgtatgtatacaactttgtgtcttgtgtgtcaagatgattttgtctaattacacaaatgtgcacctgggggtaattgtgggtctgattatacctgtgcaaaattcaaatatgggtacaatttgcaaacataaacataaaattgtgtgtatgttcacaatcactggtataatcagacatgtattttgtatgtattcatttgcatgcataactgtgtgtacatatgtgtataattttttatgtgtatgtaggttaattaataatagtgttgctcaagtattactatgtgctaccctaatacatatcatacatttaaattgcattatatcttatatgtatggatgtaagtaattttgtatattgttgtggtcagtgggttttgggtttaatttgtatatgtgtaaaatcattgaatgcaattcaacgtacaatattgtacaatatacaatattgtgtattgtgtatgaatatgggcacagttttcatttgtggatttatatgtctgtagaattttcatctgtgttagctgaatgagctactgtgttctatttctctgccagatgagtgctagagaggactctagctttggggcgttaacatatcctggttagggaattaagatcagggatttggatggattgaagggtgggtggatgaatggatggattaataaacagatggggtcaggcacagtggctcacgcctgtaatcccagcactttgggaggccaaggtgggtggatcatttgaggtcaggagtttgagaccagcctggccaacatggtgaaaccctatctttactaaaaatacaaaaattggccacgcgcggtggctcacccctgtaatcccagcactttgggaggccgaggcaggcggatcatgaggtcagatggagaccatcctggctaacatggtgaaaccttgtctctactaaaaatacaaaaattagccgggagtggtggtgggcgcctgtagtcccagctactcgggaggctgaggcaggagaatggcgtgaacccaggaggtggagcttgcagtgagccgagattggccactgcactccagcctgggcaacagagtgagactccgtctcaaaaaaaacagaaaaaacaaaacaaaaattaaccgggcgtggtggtacacgtctgtaatcccagctagtgggagactgaggcaggaaaattgcttgaacccaggaggcagaggttgcagtgagtcgagattgcgccactgcactccagcctggggtgacagagcgagactccgtctctaaataaataagtaaataacagatggacagatagattggtagaaggatgactgtgtggataaaggaacggatgggccaggtgtggcagctcacgcttgtaatcccagcactttgggaggccgaggcgggaggatcacctgaggtcaggagtttgagaccagcctggccaacatggcaaaaccccatctctactaaaaatataaaaaattagccgggcatagtggctcgcgcctgtaatcccagctacttgggaggctgaggcacgagaatcatttgagcccgggtggtggaggttgcagtgagctgaaatcgcaccactgcactccagcctgggtgacagagtgagactccgtctctaaataaaaaaaaaggaatggatggatgggtggacagatggatgggtaaatggatgggtggatagctgcataagtgagtaaataaatggatagagggatggatggataggtggatggatgaatagatagatgggtcatttaatgggtgggtggatagttgtatgagtgggcgaatgaatggatggaaggacagataaataggtggatgatggaaggatggacggatggatggatgaacagatagacgggtaggtggctggatggacagttggatgaatgggtggagggatagatggatgaacaggtagatgagtggttgagtggatggatgaatagttggatgaatgagcaaatgaatggatggagggatggatggatagatgaatagatagatggataggtgaacggatgggtggatagttgcataattaggtgaatgaatggaaagagggatggatggatggatgggtggatagatgaatagatagatgggtaggtggatggatggatagttggatgaatgggtagagggatagatggatgaacagatagatgggtggttgagtggatggatgaatagttggatgaatgagtgaatgagtggatggagggatggatggataaatagatagatggataggtgaatgaatgggtggatagttgcataagtaggtgaatgaatggatagagggatggatggatgggtggatggatgaatagatagatgggtaggtggagggatagatagttgcatgagtgggtgaatgaattgatgaagggatggttggatgggtggataatgggtggatggatgaatagatagatgggtacatggatgggtggacagttgcatgagtgggtgaatgaatggatggaaggatggatgaatggatggaggaatagataaatgagttgttgaatgtatgggtggatagttgcatgagtggatgaatgaatgaatggagggacaaatggatgagtgggtggaggctcaaagggaaacaaagccttagtgcagagtcagtcagcagtggctatgagggaacctgaacccaaatccctctaccctaccctacactcctctgtggggcagggaaggacaaagcagcccatcccatctgccttctgcctgccaaagttttatacttccatgactttgccaggtttccccaggagctgaatgtgggtaaaatcagcgctgaagtgatgtggaatctgtttgcccaagacatgaagtacgccatggagggtgagtttcccaccccagtgttccccagcctggccacaccaggtggctgtacctctgtgtcccctccaaggctgtgagcaccctataataccctcatgcctgagttggaaatcagtgatggccagagtaggcagcctctctgccgagacagagggtggcagacccttccagctgtgccatcctctttgtccctggccagagcacgacaagcatcgtctatgcaagagtgccgactacatgaacctccacttcaaggtgaaatggctctacaatgagtatgtgacggaacttcccgccttcaaggaccgcgtgcctgagtaccctgcgtaagtcccctgccccaggcccaacccaagccagaactgtagcactgacagctagaaggaaagccagagaggaagactgacctacttagggttacctgggcatcaggggcatgggtggggcttgaatccagtgttctccactctcagccattgagcagttgactcctacagcccagaaaattcagtcaacagcaacaggaaccatgtgactttctcattttatccttttgacaattctatgagttaaggtgggatcattttaattcctattttgcggaggagaaattggagagttaaagatgccaaatggccaggcatggtggcacatgcctgtagccccggcaatctgggagactgaggcaggacttgcttgagcccaggagttcgagaccagcctggaaaagatagtcagatcccatctctaaaattaatgaatgggtcaggcacagtggcttgtgcctgtaatcccaggactttgggaggccgaagtgggcagatcacctgaggtcaggagttcgagaccagcatagccaatagggcgaaaccccagctctacaaaaatacaaaaattggccgggcgcagtggctcatgcctgtaatctcagcactttgggaggccaaggtgggtggatcaccagaggtcaggagtttgagaccggcctggccaacatggtgagaccctgtctctactaaaaatacaaaaattagccaggtgtggtggcagatgcctgtaatcccagctacttgggaggctgaggcatgagaattgcttgaacccaggaggcggaggttgcagtgagccgagattgcaccactggattccagctggggcaacaaagtgagactccgtctcaaaaacaaagaaaaaaattatccgggtgtgatggcacacacctgtagtcccagctactcgggaggccgaagcaggaggatcgcttgaactcaggaggcagaggttgcagtaagcggaaatcgtgtcactgcactccagcctgggcgacagagtgagactccatttcaaaaaataaataaatataaaaataaaatgaatgagtgaataaatgccacattccttgcccacggtgactcccagtacatgacagacccgagatttgaactcgggacatctgattcctgggctgtgtgttggaggatagtacggtgccgccggttcctgagaattgtggtgtcgttctctgctcccagcagcacaggaggatggctagtcttctgttgtacaagaaacgaaagctctggctggatgcggtggctcattcctgtaatcccaacattttgggaggccaaggtgggaggatcacttgaggccaggagttcaaggcctgcctgggcaacacagggaaatcctgtctctacaaagaagacaaaaaaaaaaattagccgggcatggtggcatgtgcctgtagtgccagctattcgggaagctgaggtgggaggattgcttgaacccagcaggtcaaggctgcagtgagctgtgatcgcaccactgcactttagcctgggcaacagaacaagacccaggaaggaaggaaggaaggaagaaggaaggaaggaaggaagggagggagggagggaaggaaggaaaggagggagggagggagggagggagaaaacaagagctcagagaataaacccacttgccatgggcagtttatctgaagaaggaaggaaggaaggaaggaaggaaggagggagggagggagggaaggatggacggaggactcagagaggactcagagaataaacccacttgccatgggcagcttatctgaactaggattcccacaggcctgggccctgttgtaaaaggggccactcaatctatttcatgagcaaagtaactgaggttcagtgcaggaggcgagcagaggagcagccactcaaggctgcagggagagctccaggcagagcaggagcagccatagctccactcgttagtgggtcagaaccaggcggcgcagaggttgaggaggacaagaggtggcagagccccaccccggctcttcattccagatggtttgaacccttcgtcatccagtggctggatgagaatgaggaggtgtcccgggatttcctgcacggtgccctggagcgagacaagaaggatggggtaagaaggcccacccacaaccaagttcctaatcttcccactggggtcaatttaggtggaaatttgcccttgagatgaggccagtctctggtaggtgtccgccatctttgtcttgctcatggtttttaaaatcttttgttcattcatcaactacaaaatgtgagttccatcaagccggacacctccaggcaccccatggcttctgcgtccacctctagagttgactctaagtctacctcgccctctgtccatctcaccccggggaaattggtctctggctctccccgtggagagtgggagagttgggctctagggattctctggtgctgatctcctccttcctcttggcctccttccccctgcagttccagcagacctcagagcatgccctattctcctgctccgtggtggatgttttctcccaactcaaccagagctttgaaatcatcaagaaactcgagtgtcccgaccctcagatcgtggggcactacatgaggcgctttgccaaggtgtgggagagtgggtagggttggggctaggggacagggtcagggttagggaattgaagtctgagttggagatgggctaaggttgaggttgaggttggagttggtgatgtcattgaggttgggattgaagttggagtttgggttgaggttggagttgaagtttgggttgaggttgaggttgagatgaggttggagttgaggtttgaatggaggttggagttggggttagggtttaaattgagattggagttgagattggggttggagttgaggtgtagggtaaggttggagttgaggtgtgggttgagatcagggttggaattgaggtcattagtgcgagttggcaatgctgtttggttggagtttgaggctgtgctgggtcttgatttggaattgagattggagtgagtgctgagattgatgcacaatttgagtgagtcttggggtgagtttgagggttgggatcattggggttgaggtttgattcattggcattaggctgtgttgaccttgggaattacaagtaggaattggcttttgatttgagatcaggtcatcttgtggttgaggctgggttaatatgatgcttggttgctctgaaaaagagctgggtctacataaaatgatcatcttcatcgagcggtatctcctctaggtcttgatggtcatcttgagtggagaatttgcctagcccaaaggcccatcttaggtcctaatagggtttgggttcatcactgatctcactagtggccttgatgggacgactggcgcctgccttggtgccagcctctcctctcacccacactctgtgtcttccccagaccatcagtaatgtgctcctccagtatgcagacatcatctccaaggactttgcctcctactgctccaaggagaaggagaaagtggtgacctgagggggcccctgacctatctccctcctcagccccattcagcatccccaggactcccttctccccagggccctgacacctggggctatgtatgtccacctgtgtgtgatctgactggattgtctgtgtgtttagaggtgcttgtttgaatgtgtgtgatcagagtgtatctagttgtgtgtgtctgagtgtatgggaagtaagtgcatgtgtctgactgtgtattgtctgtgttgactggtatactctgcgtgtgtgtgtgtgtgtgagtctgtgcacatctgagtgtgcgtgtctgatcatgttttgtctggctttgttaacagggtatggcatgaatgtgtgtgtgagtccaactgtgcacgtctgagtgtgcgtgtgtgattgtgtttcgtctggttgtgttaactgggtataacatgagtgtgtgtatctgtgtgattgtgtttcgtctggctgtgttaactgggtataacatgaatgtgtgtatctgtgtgtgtctgtacatatctgagtgtgggtatctagccatgtttcatctgtgttaaccgggtatagtgtgagtgtatgtatgtgtgagtatgtgtgttcaactatacaacacatctaggtgtgtgtctcatattttatctagctgtgttaactggttatagtgtgagtgtgtgtatgcttgtgtgtgtgtccagctgtgcatgtctgggtgtgtgtgaccgtgttttgtctggctgagttaactgcatatagtgtgagtgtgtgtgtgtgtttgtgcacgtctgggtgggtgtgtctcaccaggtttggtatggcggtgttgaatgtgcgtggtgtgagtgtgtgtctatggctgtgtctggctgtgcatgtctgagtgtgtgtatctgtggggggggtctcgtgtgtatatctcggggtgagggcacacgccttcagtgtgtcactgtctggctgttgcaaatgaagccttcagggtgtgagctgcaaagctttgggctcttgcaggaaactctgctactcccagagttcccagcccctctcatggaccccccaccaggcctggggtcgtgggattacttgagtcctccttgcccccaccagtccccagagatgcccgccccaacaacacgcccaggaacctgagcacaaaagctcccttccatttgcaggtgaccccatgggaccccagcttcctccagacccagaccctgaaaccatcccaaggtccctggcggtgggtaggggaggctctggggagaggtcctgaggcttgactcccctctctgttcccacccacagccctgcattctcatgaataacactcaacagctacgagttcagctggagaagatgttcgaagccatgggaggaaaggaggtgaggcagggccgaggcagggctggagaagggatggggcacccccaccactgtgtccctgcaggcccctgagctcatatgccaccaggcctggggatgaattccagctcaaccatggccttaaacccaggcttgcagcataacggtctgtgcctcagtttcccctgcagccccttgggatccctttccctgggtcagatgagaaaatgcccagtacatgtggatacttactgaacctggcctggtgtcccttctccctccttagctggatgctgaagccagtgacatcctgaaggagcttcaggtgaaactcaataacgtcttggatgagctcagccgggtgtttgctaccaggtgggagcatctccagggctgggggcagtggggagggaacagccttcagccctctaagcctggggcatctggaggctcagcagatgtagaggtgaagattgcaggctcagagttagacaaggctgagttcaaatcttggctttactgcttactagctgtgtggccttgggtgagtcacttaacttctctgagccttatttttttttttattgctctgtaaatttggggtgatgacaataatagtacctgggtaggattttgagaatgaaatgaacaatgcgggcaaatgtcttatccctttgcctggttctgcagttactattttccactctttttttttttttgagacgaagtctcgttctgtcaccaggctggagtgcagtggcgcgatctcggctcactgcaccctccacttcctgggttcaagtagctgggactacaggtgcatgccaccacacccagctaatttttgtatttttagtagagacagggtttcaccatgttggccagggtggtctcgatctcttgacctcgtgatccgcccgccttggcctcccaaagtgcttggattaaaggcgtgagccaccgcatctggcctgttctccattcttgctcggttatgtgctgtgatgcaaatgatatgacctcaaggaccacagatcagcatctgtgtcctcatccagcccttcctgtggtctgagcccttcccttctgtgtccccagcttccagccgcacattgaagagtgtgtcaaacagatgggtgacatccttagccaggttaagggcacaggcaatgtgccagccagtgcctgcagcagcgtggcccaggacgcggacaatgtgttgcagcccatcatggacctgctggacagcaagtgagctgggccaggtggactgggctggccggggaggggctggggcagggccatagagacccagggactggctggagagggtgtgcagggaatgtttgctgggtggtcactggatagttggatggctgagtagatggtggcatgaaggggatggaaagttgggtgggtaaataattggaaggattggtgagtaaatatttgtgtggatgaatgaatggtggatgaataggtgacatgagggatgggtaggtgggtggacgcatggattaaaagataaatgtttagaaggatagagggaggatagatgttttaaaaagatggatgggtggatagttgggtaaatatttggatggattaataaatgttttgatgcatagatggattgatgcttagatggatggatgtctggcaggctggcttgatggatggttggatggacgatggatggatggatggatggatggatggatggatggatggataaatggttggatatgtggataaatatttggatggatgaataaatgttttgatgcataaatggatggacagatgggtggatggatgaataaatggatgggtgggtagatggatggatagataggtggataaatatttggatgaatgaataaatgttttgatgtatagatggattgatgcatagatgtctgtctggctggctggatggatggatggatgaatggatggatggataggtcaatagatatttagatcattgaataaatgttttaatgcataaatggatggacagatgggtggatggatgaatggatggttggatgggtgggtgggtagatggatggatgctggatagatataggtggataaatatttggatggataaataaatgttttgatgcataaatggttggacagatgggggggtgggtggatgagtgggtcgatggatggatggattaataggtgagaaatatttggatggatgaataaatgttttgatgcatagatggatggacagatggatgaatggacaggtggatggatagataaatggataagtggatggatgggtagaaggatgcatggaaggatggatggatgaacagatggatggatggatggatagaaaaagaaatagagaattaaggaccactgggggagggatggattggtgggtgactggatcagttggtggatggatcttggtggactgcctgtctccttcaacccctatccatccaaccacaatctctttgctgttttccctttcaagtctgccctcctctgaccattcccctcctgttcctcttgggcatggccttctccctcatagtccctgatctccatccttcctgtttcggttcatcccccacactgttctttcaaacatgaaagtctggctgtgtctccctcttgaacactccatggctccccactacccccatcctgataaaacccaagccttcctcccagacattggggccccttcccatctggtccctgctgactagtccaaccaccactcactcttctcttcatgcatcagatatcatagccccatcaaaccacccaggggtccctgtacaggctgtgggccctctttcctatctgtggaatgccttgcccacctgttaagggaaggtgatctgtgggtgggggcgagctgggccctctctcagacctgcccctcgtccccagcctgaccctctttgccaaaatctgtgagaagactgtgctgaagcgagtgctgaaggagctgtggaagctggttatgaacaccatggagaaaaccatcgtcctgccgcccctcactgaccagacggtgagacctgcagggggcccgaggggacatttaggccacctccctggcgagagcccagaaaacttggtgcctagaggctggggggtaagaacaaaggcatccggtctcagagaggtcatccaggctcaagggccattcaagggtcatggaagccaccagaggtcagtggggggccattcagaggtcagagagttcacacaggggttaaagatcatcgaagagttaaagaggtcattcagagtccattgtattttctctggggtcaaagacatcaggtagagtcaagagaccactaaagtcatagaggtcacatgtaggtcaaaatagctttcaaaggtcagaggtcatctagaaaacaggtcaattttgggatcaaggttatccttgagccacggaaggcatagacattggccaggcaccgtggctcacgcctgcaatcccagcactttgggaggctcgaggcgggcagattgcttgaggtcaggagttcgagaccagcctgggcaacatggtgaaatctcgtctctactaaaaatacaaaaattagctgggtgtgatcctgtgatcctggcttcttgggaaactgaggcacgaaaactgtttgaacctaagaggtagaggctgcagtgagctgagatggcgccactgcacactccagcctgggcaacagaacgagaccctttctcaaaaaaacaaaaaaaaaaaagagaaggcatagacatcaatgggtttttctaagggctttggggctcattcaaaagccaaagaggggagacaccatggacttcagacatcagagatcaatagaccaaggggctcctggaagtcagccagaggtcatggagggcatccaaggtcagagaggtcaagcagagatcattggccatccagagaccaggaccgatagaccagaggccataatctctagggaccaaggggacccaaacatctgtagagggatgtagctgggcgtgggtccctccgggaggcatcaagaacctgaggacagcaatggcatgtgggctgtgggcacattagggagtggggaggtctttcccaggtggaccacggaggcttggggagggtgagcgggggccatagatgggcgacgatggtcggggaggctcggacttcccatccttccacctcttctgggctgggctggggcaggggtcttgcccctccgtgctgccatctctgccccctccctggccttcccgggagactcatggtaccttattcccccctcccccaccgccccgcccccatcacggatgacagatgatcgtaagtagagtcccgtctgtccgtctgtctgtccgtcctctctgtgtctggactcggcccaccgcgtcgctgcacccctctccccacccacccagcgccccctcctcacccaccatcctccctcccgcctagatgtgcctgtgtctgtctggggcggggcatggggagggggcggggctgggagggagggagaccacgcccaccctccctgtcccactgaagtccagaggagccccactacccactcccaaaccccaagcccagctcctccttcgcagcggacctgccgtctaagggtagaatccaaccttgctcccgtgcccagatgtcaccagacgccctgaagctagaaagaggatcaaccccaggattcctctgacctcctctttgggctctgaactgtcagcagcttcccagaatgcaggtcctcaccatgagggtctctacttctgattcctctgaaattccatgctccagaccattccttggtaccccaccaccctgtctacccaactcccgccatccacaccgacacacaccaatcccagacatacacccaggtgcccaagtgggagacttttgtcatggctttgatgtcaggtagacttggggtcaaatcctagcccagccactgtctctctctgtgaccttgggaagtcacttgacctcccagcctctgtttccttgtctggaaaatggggctcattgcatcacctccctgagggtagttctaagaaccaaatggcatgatgcattaaaatactcatctcagtattgcctgaacccaggaagcagaggttgcagtgagccgagatcgcgccactgcactctcagtgaccggcccagaggcagagctaatggtggtggtggtggtggtggtggtggtggtgatatgcagacatgtgtaagagcagagacaaaacaacttcagattttccctttgtgggcaagacaaggctgttacaagatttcactttgttaaaagtttacaagggctcttacttcctggtagctgcagcctgggtctttggctataaccacttggtggcagcatacccaaccacaggcaatgcatttgtaggcagggggaataaaggaattcgcatttaatgactccccatatgccaggccttctcatagctcctgtttcagctcaccttcatgataaccctttgagtgaggtggatattattatccccattttgcagatgaggaaagctgaggctcagagaggagtcacttgttcaaggtcatatagtaaatatatgccagaatcaggattcaaattcagatctgtctgaatatgcagcccatttgctttcctgttaacccaagaaccaagagtctcatgtgtacagtaaatgtaaatggattatattttggcagtggcttttttcccttctttctgactttctttagctctgtatctgtatctttctctctctttcctgtctctgcctctcacaccatttaagagtgagtcactaaagcgcatgcacgtgtgtgcacacacacagacacacacacaaacacactatccccatgcaacccagtcaccagtaccctgtgcagtgtggattcccccatccccatgaatattcctgtgagcatcccagcttcccaccctgcacgacttgccaggttgatcaccctgtgacattatctctgcaggggaacctcttgagaaaacatggcaagggattagaaaaggtaatgagggcctcgtctcactgaggccctgagctccagtgtctgggcatgtgtgtgcatgtgtgtgcgtctgtgcacctgggcaggaagggcagctgggggtcgtgggtaggagatagctctcctaaccaagtcctgcaaaaccagaagtcagagatgaagtgattctccagggacagaacgtgcagtgtgtgtgtccacatgtgaactaatgtgtgtgcacaaacagctcccatcctcccacagcaatacccacagggctcatctgagccctgggctcagctgaaattctgtgccttcttgaggagcctacacgctagatcaccaccctggactgagacgtgttgttttttacgtagatttctttttgttgctgtgctaatgggtgtttgttgttaaggagatgggagctacagcaacacgcaagcagctgtcttgctgtacacttgtgcagaagatatcgttgtacatttgtgtctacaaatggagtcttagctttgtgaatgtgggtcacaggggttccgtactctctctgccagccctttgcggggcacattcagtgtcccaggcaccctatatgtggatgtgaatccgtgtggggtcaagaagggtgtgtgggtttttgtgtgtgatataattgtgtacgtgcctgcaagtgtttaggagtgcacgtatgtagtttagtgtatgggttcttcagcactgagtgaacttacagtatatgttaatatgttttttgtagacttgggtgctgggatataggggcagccccttagggaatggaggaggagacagattcctagccctgtctcatctccccacctccccaggtgccccatcctggggcaggctgactgtgggatgaggctgcttccagcctcctgggtaccccgagagtgtgctggcagtcaaggagtctgacctctaaacccctgctaggggaccagaggaggtgctagctggggagggggcccaccattagacccaggacctggggaggagctcctgggctgggaagtgagactgtgctttgagggggcagggaagtcccactgagtatcctcccaacagtcaccagaactctgacctccacctgattctctccacagggcagggtgaaattgccaagccactcagacgtaagaccggcctctcactgtctgtctggctcccatcccactcccccccaccccacccctgtgcccccttccacctctgtggttcgtgccgtccgagggcgtactgtgaacctgtctgttggtctcttcttcctttgtctgtctggcttgctcgtggggggtggtgggtggggggttggtgggtagggcagagggtacccaggaaggcccctgagccctgccagactacaggtgggtgcagcaggggaaactgaggcccagtccgctggacccctgagtaactgtgccttgtaagaacctcaggatcacagacaagaaataagaatagtaacagccaagatgataatagtaatacctctaggaatgaccagatggccagctggtagactatgaacataattccaaatatttccacagtaaatgggccccctccccacctagcctcacccaggacccccagaccaccccaggacccagtaagacaagacttgttacctcaatactcagccccaccctgtcccccaagttaccatgggtatccctgttagccacagtgggaattgaggctcagagcattcagggacaagcctggggccatccagcagtgacagaggaggctagacacatgccttccaggctgggaccccgtctcccttagcattgcccgtgactttgagaccaagtgataattagcgaacactgagcaaagacttgttcagtccagactaagccacaaagtggatataattttcctcatctagatgggaaaactgaggctcagagaggttaagtgccttgcccagggccacacagcaggactgcaatttgaacccaggcccatctggcttgtcagagccatcaccacatcaccatcttgctagtgtctgtttgggggtggggtggaggacggatatggaggtgtttgtatagagggaggatttttcctttaaaaggtcagactggctggcaatgtggctcacgcctgtaatcccagcactttgggaggctgaggtaggaggatcgattgagcccaggaattcaagaccagcctggacaacacaacaagaccccatctctatgaaaaaaatttcaaaaactagctggatatggtggctcacacgtgtagtcccagctactggggaggcgggaggattgcttgagcccaggagtttgaggctgcaatgagctatgatcatgccactgcactccagcctgggcaacagagggagactctgtctcaaaaaaaaaaaaaaagaaaagaaaaatcagactgaaattcctcccagattacaggggaaatttccctgcagaggggatgctccttgaggaggaggaagtgtttgaccagagccattttctgcaacctcagcctagcctattgtgttcccaaagctccctttccctggaaaccctgcccacacccacaaacaccaccgtctgaggctcccccaacccactgcccctcacagtctggtccctgtctgtttctcctgttacacaagcctgggtggggctgagagggtgggggactatcctcacaggaccgggattttcagggacaaggtcaccacatcctcctcagttcttcctggggaattccagacctctgtccctgggacacaattattgccctgcccagagcctttgggcaagaaccaagatggtctctggggctggagtgtcagctgtagcacccctgccctcacccagctgtatgttgttacctgcagggaacccagatgatcttcaatgcagccaaggagctgggtcagctgtccaaactcaaggtgaggagtggggatagattatggcgtgagggactgccccccaaactcatgtggcttccaggttgccaccatcctgggggaggggtcccaggatgatgacatgcattacaggctcaaaggacagaaactctactcactgaagcacaagatatttgctccccagtgtgtcagaaagatgtgaatggttcagcttcaggtacagcttgatcaagagggcaagtcatttattcaaccaatattttttgagcacctgctgtgtaccagtcacatattgggtgctgggatgatgaaaacatagaccctcagcccagctcctccaagttgaacagggatgagacccatagacacagattccaaaggtggagcccactccacccacatggcccctctccccatccatccaggatcacatggtacgagaagaagccaagagcttgaccccaaagcagtgcgcggttgttgagttggccctggacaccatcaaggtgagaggccctacccctccccatcccaggtgggggatgtagagggtgtggctgctgtggtcatggacttaggctcgcctcggacccacattaatttgttcaatttatggacactccctcgttcccctgtctgtgccagagctgggctggctaatgctggagccttaaggagccccaggtcggggaagactgctggatacagacattctcagccttgtaggattaggcttggggtagagggaaggatgtgggctgggggagcccaaagagtgagaaggtgtagagggaaggatgtaaaggacctcgtgccaggcatttcttgaggtgtagaagggtagagggaaggatgggggctgggcgagcccaaggtgggagaagccaggccttcctggaagacggcatgtgagaggtgggttctgaggaatgcataggagttcactaggcaaagcaaaggaagaggtgagaaagtagtagcgggaagaattgggagtggggacagcagggctacccagccctatgagtgggtagaggttcccaccatcctcacctctccccaccctgtcctccccagcaatatttccacgcgggtggcgtgggcctcaagaagaccttcctggagaagagcccggacctgcaatccttgcgctatgccctgtcgctctacacgcaggccaccgacctgctaatcaagacctttgtacagacgcaatcggcccagggtaagggtacccagaccgcatcaccctttcccgctccgcggagacagccccgccccaagcctgaacggctgccattggctcactcccctgtgacgtcatggatggggcggaattgacatctctgcaccaagtccagggaccaatgagcgatcaaaggttcatgggggcggggcctctgacgtcacaggcctggaggtgatcgtcaacccctgggaaaatctgtgatgtcctggggccagacaatgattaacagctctgggatggaatgtctttgacatcaaggaccagggtaggattgatgactcttaggtgtggaacctgtgacgtcgtagggccacaaggtgattgtcatctcctgggaaaatcaatggtgtcccagggccaatgaatgattgtcagctcctgagggacctggacagtcatgggtccagggaatcgttgacagctctgggagacttcaggagtgattgacagctcaggatgggcaggacctctgatgtcaaggggtcaaggaatgattggcaggtccatgggtgggaactttgacgtcatggtcccagagagtggttgaactcccctgaggagggacctctgtgatgtcatggggctaaggaatgattgacagctccgagggcgggagggacctcgacttggtgggggagggtggacggagagggagttcccatttctcaaactctctctttctctctgtattttgcttcggtctcctgtccctctctgagcgcacacacacggcagctggggctggatggagggcaggattccctggggacccccccttttcaaaattggtcccgacaaggggaagaagtttggcggcttgaactcaggagggggagggagaatcgccatcgacacccagcctggggcgaggggagcaaagccctgtggcctccaacggcccccttctcccccgatccagccagcccaagggccctccgtgggcgctgggtctctgagctcagcttcccttccagtcctggctgcttttagtgtccctggtgtccctggagcaggaggctgtctgtctctccgtctgtctgcagctgacgtttctctctctcttgtttttcctccctctcactcgccgtcccctctccgcgcctcccctgccccctccacacacactcctccatcctcacctctcactggctcgtctctccccgctccccatgcttcccacctctctcccccttccacccccacccccaattagtccatggtggaaaaggtactaggtttacccttagtgaagacatttatcctgagaagggtacgtgcctccgcctcccgcccgccgcccgcgcctggtgcccggtgcctgcgcccctcctggccccggctagtaaaaggatcgtccttctgcctcaagggcctgcagggccgccgcccaggcctgagcggcttggagggcccaggcgggtgagggggaaggacgatttgctggttctacatggggaagaagcgattccagtgggaatcccagaatccatttctcctgatatgacatattttttaagccagatcctgggaccccgggacaggcacctgtcaggttaagagctgggctctgattccagcccagccactccacgggtaggcaccttgggcaagaatctgtctccctgagcctcagttttctcatctgtaaaatggggacagtcaaggaccctacttcataggattattgttattgatattattatttagagacaaggtctccttctgtcacctaggctggaatgcagtggtgcaatcactgctcactgcagcctccctcctgtgctcaagtgatcctcctgccccagcctcccgaggagctgggactacaggcacacgtcacatggctagctaatttttaattttttttgtagagaggtggcctcactttgttgcccaggctgatctcagtgaatacttatcaggctctaaggctgagcaggaccttgtgccaggcatttcttgaagaatctgtgtttggttttgttgttgttgtttgagacagagtctcactctgtcacccaggctggaatgcagtggggaaatctcagctcactgcaacctccgtccgcctcctggtttcaagcgattcttgtgcctcagcctcctgagtagctgggattacaggcccgcaccaccacgcctggctaatttttgtatttttagtagagacggggttttgccatgttggccaggctggtcttgaactcttggcctcaagtggtccacccatcttggcctcggccttccaaagtgctaggatgacaggtgtaatcccagcgcctggccattttgtttttaatttgaggcagacgctgtcacccaggctggagtgcaatggcgaaatctcaggtcactgcagccgccacctcctgggctatgttgcccaggctggtctcgaactcctggcctcaaatgatcctcccaccttggcctcccaaagtgctgggattacaggcatgagcctccatgcctagccttcttggggaaactgaaacagatttctttaactgccccacgaggggtacatcattccacagatgagatactgagagccaaaggagattcaaccacttgtccgaggaaccttcccctgcaggggtcccgggacttggggagtggggagtggggttggaagaagcactgagaggcccaggaaagacccttccccgcgaagccagcaaagcacgggatgggggcacccagcactgcctccctccccccttcttactagctttggccttggtctgacccctcacctgacccaccactgtccaattccccctggcacccccggcaccccagtctggcccggattgagcttgctatgaagcatcggcctgggggagggcggggcggctgagcatgtgactggtggcggggggtgggggtggaatgggagcctgaggcaacaaggaagacggcctggggcgtgcagcaaagaccggggccacataccccagtactggggtgatgggggtctccaggcccctgtgctccccaaccctcagtcacttcctgtccagcgtgaggtaacccaatcagcgtttgactgacccaacctcccaccctcacctctgactttccccttcttctccccgtgcatggggtggtccaggagtggggagttgcctggtggggggtggggaggggttggtggaggtgctggcggtcacaggtccacaggccccacaggatgcccttttgagtcacagaaggcgggaccgggagagattcttttaagctgccccatcagtgatccccattggcaccatggaggacacggctggtggccccaaacagaagcccaccacaccatgattcaagcagacaagggaactttttgactccataatggaaaaattaggggttgaggcctggcgcggtggtgcatgcctgtaatcccagcactttgggaggccaagttgggcggatcacttgaagtcaggagtttgagaccagcctggccaacatggtgaaaccccatctctactaaaaataacaaaaattagccaggcgtgttggtggatgcctgtaatcccagctactcaggaggctgaggcaggagaatcgctttaacctgggaggcggaggttgcagtgagccgagatggtgccattacactccagcctggtgacacagcaagactctatctcaaaaacaaaaaagaaggccaggtgcggtggctcatgcctgtaatcccagcactttgggaggccgaggcgggcagatcaccaggtcaagagatcgagaccatcctggccaacatggtgaaaccccgtctcaaaactacaaaaattagctgggtgtggtggtgtgcacctgtagtcccagctactcaggaggctgaggcaggagaatcgcttgaacctgggaggccgaggttgcagtgagccgagatttcgccattgcactccagcctgggcgacaaagcaagactccatctcaaaaaaaagaaaaaaaaaaaaaaaaaaaaaagaaacttaagattctgcactagaagggaaataggggtaaggaaaataaaagatgccgctatgagctgtcacatcaggagggatgaggattctgggccaggtgatgcaatgaggtgacctgtggggctgggtcagagttaacaagggcaagaatggggtgagtggggagaggtaatagtaacctattggaaagggccactattggaaggggtgttgcaggtcacaaaaaccactttgattatctcagagtgaggtgggagccatggaagagtttggttttgctttgttttgttttttgagacagtcttgctctgtcacccagactgaagtgcagtggcgggatcatagctcactgcagcctcaaccagctgggattaagcgatcctcctgcctcagcctcctagatagctgggactacaggtgcatgcatcaccacacctggctaattttcttttctctctcttttttttttgagacagggtctctctctgtcacccaggctggagtgcagtggtgcaatctcagctcactgcaacctctgcctcccaggttcaagtgattctcctgtctcagcttcccaagtagctgggattacaggcgtgcactaccacacccggctaatttttgtatttttagtagagacagggtttcgccatgttggccaggatgggcttgaactcttgacctcaagttatctgcccacctcagcctcccaaaatgctaggattacaagcatgagcctcccaaagtactggggttacaggcatgagccaccactgcccgacccatggaagagttttgagcagaggagggacatgatctgacttttaaatgttatttatttattttttaattttctgagacagggtcttgctctgtcacccaggttgaagtgcagtggtgcgatctcgtctcactgcagcctggacccttctgagctcaagtgttcctcccacctcagccaccagagtagctggggctacaagcacgccccaccatggccactaatttttgtatttattgtagagatggggttttgccatgttgcccaggctagtctcaaactcctgagctcaagtgagtttgcctcaccctcccaaaatgctgggattacagctgtgagccaccgcgccctgccgacatgatctgacttaataggatttttctggctggtatactgagagtagatgaaagagtggaaggaagaccagcaaggaggctactgcaatagtccaggcatgggatgctgggggcaggtgtaggatacagggaaaagacatggctctgcttctggatgtattttgaaggtagagctggcaggattttccagtttatgggcacctagggaggaagtgaagacaaagaagagtgtcaaatattgaggtgcagggtcagtttgaggacccacggaggagaaaatgacaaaagggggttggagggagtgacaactatgtaggatgagaatcgagttggtgacattgttgcagccaagaggacaaacagccacaggaggccagggtgccagatgctgccaagatgtaatgtaacatgaagactgaattttgacaacatggcaatcaatggaataagaaaaaagaaaagaattgcattaggctcagagaggttaagcaatctacccaagatcacacagcaaggcagtaaaaggccagaacccaggattcttggcttcccaagagcacctcccatcctggccccccatcagtgcctccctatcagggctgatgacctggtgccgccagcacaggtgggtgggaggccgtcaaggtccctcctggtgggtgggaaagaacagagctcacgctgaccatcctcccctgccctgcccaggcttgggtgtagaagaccctgtgggtgaagtctctgtccatgttgagctgttcactcatccaggaactggggaacacaaggtcacagtgaaaggtgagtggtctgaggtgggagggacttgctaggttctaaaacagaaaccaaactcaaactggcttaagcaacaccctttttttgttgttgttgtttaatggtccatgaaacggaaacgtccaaaggtggccaccttcaggcatggctggatccagcagtgtaaacagttttgtaagactgaatcccactttctccatctctcagccctgctttccttttcttggcttttgttgactagaacacagattgggctgtttttgacatggcttaaataagacagaattaggccaggcacggtggctcatgcctgtaatcccagcactttgggaggccaaagctggcggatcaggccaggagttcagaccagcctggccaacatggtgaaaccctgtttctactaaaaattcaaaaagtagctgggtgtggtggcgtgtgcttgtaatcccagctactcaggaggctgaggtgggaggatcgcttgaacccgggaggtggagtttgcagtgagctgagattgcgccactgcactccagcctgggtgacagagtgagactccatgtaaacaaacaaacaaaaatgatagaattggtttttctctgggataacagtttaagtagcaaccagcctcgagctgatatggaggcttcgcagtgttggtgatctgtgctgctgccatcttttgttgcattttcatccctaatgtgttgttgttgttgtttgtttgttttagaggccagagtctcactctgttgcccaggttggagcgctgtggtgcaatcacagcacactgcagcctcaaactcctgggctctagcgatcctcctgcctcagcttccggagtcgctgggattgcaggcatgcagcatcacacctggctactttttaaattatatttttgtagagatggtgtctcactatggtatccaggctggtctcaaactcctggcctcaagcagtcctcccacctgggcctcccaaagtgctgggattccagacgtgagccaccatacctggacccaaatgtgtttttcctccactatagggtcacaaagagctcagcccccacaagcattgcagactgcggctagaggaaggagaaagtttggggttcactccctgccttttaagccacagtggagaagtagtacacgtgatttttttctctcacctcattggccaaaacatagtcatatgaccacacttagcttcatggcaatgctgggaaatgtagtctttatttcagacagggtttttggcggcgggcgaggggtggggtgtttttattttttattttttttagacaggatcttgctttgtcacacaggctggagtgcagtggcacaatctcagctcactgcaactgccgccacccaggctcaagcaatcctcctgctttagccccacaagtatgtgggactacaggcgcgtgccaccacgcccagctgatttttgtatttttcgtagagacagggtttcaccatgttgcccaggctggtctcaaactcctggactcaagtgatccacccgccttggcctcccgaagtggtgggattacaagcgtgagccactgcgcccagccttgggcaggttttgagagccacaaacatctactttttccaactgggagaacctgacctgtcttaccctctacttcctccaacagtggtggctgccaatgacctcaagtggcagacttctggcatcttccggccgttcatcgaggtcaacatcattgggccccagctcagcgacaagaaacgcaagtttgcgaccaaatccaagaacaatagctgggctcccaagtacaatgagagcttccagttgtgagtttgggatgctttgaagagcatgggggcaagggagggggcatccgccaggtgaaccccaaagccagctaggcaggaggtatctggaatctgggcccgggaatgggaggggccacattctaggtgggggtgctggaaagggagaccccttagtagtgcaggaatgacatcagggaggggacacgaggatggaggtcacctttgggggctggcagatccaaggggaggcaatgagtagagtggggtaacttcatgatgaagacttgcagaggggagggaaagtctgggcaggaagtgcatggtgggcagggccattgctggggctggagactctgtctggtgaaggaatgagggtggcagtgatgacgcttatgagcggggggctgagggacctggggacaggactgaggttgcatgggggtggggactactggagtctacattgagccttgtcaggaccgttggggcagcccatctggaggagtcggctctggggacaggagtggagtgtagatggatcccaggcttgggggtgggtgtcacgtggggtggaggtggggtcacattggatggaggttcttggagttgggagtgggcctaggctgcgggtatcaggatagggtctagaggatgctgatgatgtggacagcataaaaaagtctgctctggccgagtgtggtggctcacacctgtcatcccagcactctgggacgccgaggcagacagatcacctgaggtcaggagttcaagaccagcctggccaacatggtgaaaccccgtctctactaaaaatacaaaaaaaaaaaaaaaaattagccgggtgtggtggcgcacgcctgtgatcccagctactcgggatgctgaggcagaagaatcgcttgagtccgggaggcggagggtgcagtgagccaagatcgagccattgcactccagcctgggcaacaaaagcgaaactccacctcaaaaaaaaaaaaaaagtctgctctggccgagcatggtggctcacgcctgtaagctcaacactttgggaggccaaggtgggcagataacttgaggccaggagttcgagaccagcctggccaacatggtgaaactccatctctattaaaaatataaaatatggctgggtgtggtggctcacacctgtaatcccagcactttgggaggccaaggcgggcagatcacgaggtcaggagatcgagaccatcctggctaacacggtgaaaccccgtctctactaaaaatacaaaacctagccaggcgtggtggcgggcgcctgtagtcccagctactcgggaggctgaggcaggagaatggcgtgaacccgggaggcagagcttgcagtgagccgagatcgcaccactgcactccagcctgggcaacagagcaagactccgtctaaaagaaatatatattatataattatatataaaatatgtatttatattatataattatatataaaatatgtatttatattatattatataatatataataaatatatatcatataaatatatttttatatattatatataaatatatatatatttatatacatatataatatatatttatattatatataaaattatatatagtatatattatatagtataaataaaattatatatagtatatattatattatatataaaagtatatatattatatatttcatatattatatattgtatataatatagtatatacaaaaaatattagctgtgtgttgtggtgggcgcctgtaatcccagctacgcgggaggctgagacaggagaatcgcttgaacccaggaggtggaggctgcaatgacccaagatggcgctactgcagtccagcctgggctacagagtgagactcaaaaaaataaaaaatacagaaattagccgggtgtggtggcaggcgcttgtaatcccagctactccagagggtgaggggtacgagaatcgcttgaacccaggaggcacaggttgcagtgagccatgattgtaccacggcactccagcctgggcgacagagcaagactctgcctcaaaaaaaaaaaaaaaaaaaaagtctgttcacgggggtagatggatggtggtggttagcaagggtagagttggggtcatccggggtagatccttgggtcgagtgtcagcctcacagagcactggggcagggcaatgttgttggatgttcttaggagacagaagtgcagaagaaagtagtcccagctacctgggaggctggggcaggaagatcgcttgagctcaggagtttaaggctgcaatgagctatgattgtgccactgcactccagcctgggtgaccgacatagcgagaccctgtctttaaaaaaacaaaaaactatgggccaggcgcggtggctgacgcttgtaattccaacactttgggaggccaaggcagtggatcacctgaggttaggagttcgagaccagcgtggccaacatggtgagacccccccccccgccacccccatctgtactaaaaacacaaaaaatcagcccggtgtggtggtgcatgcctgtaatcccagctactagggaggctgaggcagaagaatcgtttgaacccgggagacagaggttgcagtgagccgcgattgtgccactgcactccagcctgggtgacagagggagatgcccactcaaaaaataaaaataaataaaaataaataaaaatgcacaggggtaagggtaaatcagagctggttagctggtattatctagggggcctgggagctcttatgggacaagattgaagccagttccatgtcgtgtcagcacagggctcttggtcagaaggttttggggcgattggcccctttaggggatactcaggaggagaagcatggtctagtgggaggtcagatgtcagccagggtgggccggagtacttcagggatagaggtacaacctgggaggtggacaagagggagaagctgggcgtgaccctgtaggaggggctcttatccagctggcgtcagggcaggtcactgggactgcttaggggcaggagcacaggtgaggggcatgcgggaggcggtgtcacccatggtgaggcaccagggcaggctcatgtctggagggcatcttggaagtaagaggggtgggctgggggtgtggggggctggggaaagggccacgtcgtgggtctagaggagagcctggttaaagagcttctgggtgggacattaggggcagggccgtgcgggcagcagttcagccggcagagggcacaggcgcgggtatctcagggtgggagcatggccttgcagggcggtgtctgaggggcgggagctggatgtaaaactatgcggtcatttttcggtgggtggaaaaatgggaagaacaggcgtgggcgtggcccagctcggggtcagctgctgtgggcgcggccaagcacagggttgtaggtcaagtaacggggcaggggcggggctagcgtagcgtgggaggtgacaggtgtgggcaccccggtgtgggcgtggcccgcaaatgcggtggggacggggccgtgggcggggcatcacagtaggtgtggcctgtctcacgttccgcccctccccacgcagcacgctgagcgccgacgcgggtcccgagtgctatgagctgcaggtgtgcgtcaaggactactgcttcgcgcgcgaggaccgcacggtggggctggccgtgctgcagctgcgtgagctggcccagcgcgggagcgccgcctgctggctgccgctcggccgccgcatccacatggacgacacgggcctcacggtgctgcgaatcctctcgcagcgcagcaacgacgaggtggccaaggagttcgtgaagctcaagtcggacacgcgctccgccgaggagggcggtgccgcgcctgcgccttagcgcgggcggtcggccgagcggcactgcgcctgcgcggagggcgctgggcggggagggacggggcttgcgccttggtgggacctccccaggggcggggctcggggggctccacgccaagggtgggctgcgcctacgcccttgactcagctttcccttttggggaattaggaatggaggatgccccgccctctcgggaggccacgcccaagggcgcgacgaaggaaggagccacatccccaacttgaggccacgcccccagcacctagggggcattttgagctgggatgggggaaacctcgtccctatggaggaggccacatcccggggctctggtaccgggaggcaccacctcatgtcccctggaaaagccataagatgggacccagacccctgggaccccagaccaattgccaagtatggaaatctcagctccctcgagggggggccctgggcaaggggtagggctctctggagcgcccctctaggtggcctggggactggagggaccaggatgctggttggagggccccggaataccggagtccctttagatatttgtgcaaaaaataaatggggggaggggggaggatgggatttcaaaagcacatgcgcccttgggcgcccaaaccctgggggccgaggggacggctctggttccccacgctgcccctacttccctttgggagtttgcctctccctctcccccaacaaacccagtcctcatatcatagagttcaacacacccatttgacagatggcaaaactgaggcttaaagagctgcttgagacttggccaaggttccaggtgccataccctctgtgcccctcccttaggcctgtgtgccccatggaagggtgggctgagatcgggatgacctgacacagctccctattgctgctaattccccctcggcctcctccaaggggtgggaattccaggccaagacccctacttcgcctttccttctccggctgccaagcaggacctttgccctcagccctttctcctgggatctccatgggggatgccatgagggcctcccaccacaaaagagaatttgggatcccctggtcccaggtttctccatcccttcttccttttccagaattttccaaataggaaagaacagaaggagaccagaaactctaggggggagaaagagaatgagagaaagagaatgagagagagagaaacacaaacacagtgacacagtgagagcttagtctccaagagcctattcattgattcaaacacccaagccacaggatacctcagatggccctcttgccagctggaagctctttctccaatgagcaaagttacagtgacctggctggagttacctggtgcacataggaccttaggggaaagttcagcgtggactacacttgctctgggatctgcttttccacatgtgtgtatggcacgcctttttctgctggattgggaaggacaagattttgctgtgctagggagaaatgaaaacggggtgagctgagtagctgggtttctggaggatagaacatcagatggggaggctttccgaggtgaagaatgagagggaaccacttactagagagaaaagagctccaggcctggggaacagcacgtgcgaaggccaggagagaagaactgttgaaacaacgagaagggtggcacggctggagctgagccagcaagggggatcgtgaggagccttggggttggggagatctgcagaagcatcagaccaggcagggcctcgtacgcagtcctgaggagttttacttttattctaagacagttggggagctccaggagctgttttaagttggggagagactggattccagcctgcaaaagctgttttgtgaagactaaaaccagtgaggagaggtggaggtgctttggggacactgaaatggattcttggaaagattctgaaggctgtgttgaaaagacacctatagctgtggggacatgactataatcccagcatttggggagaccgaggctggcagatcacttaaggtcaggagtttgagaccagcctggccaacatggcgaaaccccatctctgctaaaaatacaaaaattagctgggtgcagtggtgcatgcctgtagtcccagctactcaggagactgaggcgggagaattgtttgaaccctggaggcagaggttgtagtgagtcgtgatcacacaactgcactccagcctgggcaacagaacaatactccattccctcccctctaccccaccaaaaaaaaaaaaaaatcctgcccttagatgagctctagggctgctgagtacagttgtcccagttgcacagtgcccaagggtttggcattgctaagaaggccacgtgcaaatcctagatattgagtgttgtatgtttgtgacgttggtttcccgacatgtgaatggcccaagtgtctggaagaagtggcgccactttctaatttgcttggagatgttgcatgtcccttaaattcagacaggtgcaggtaactggaggttctgaaccaaaggttaaaatgcaaattctcatacagggttgggaagttgtagccagggataagcttatgtgactgttatatggactgaggagcagatgtgaatttcgaaccatgacatggctgagggtaggggtcgggtggatggatgattcagggttgtaacccatagagcccaaaggggaagtgatctgtgacctggggtgagggtgatctggaagatttttggatggctggaaagaaatggggaagtcgagctgcctgagagagccaagttatttcccaaaagattccttaggagtctttctgttcaagacctccgtgtgtgtgtgtgtgtgtttagggttccccagcaatggcccaggcatgtgaaggaaacaagcttcttcagggaatatttgttgaatgagttttcctgactcccaggctagaactgtttttgcaatttccaccctcttttctttcccccagagaactcctattcgtccttcaaaacccatcacggaaacccctcttggagaaaaccctccttccttcccctcaggactttcccagccaccgtctctcctccagtccagcctgatgccatgggactgggggtttctctgtccagctctgtttctcccagactggggtctgaggactctcaggacccccaactttacctagcacaggctgggcacaagtgggtgacagggagtctacgcctagtggaattatgtattggggcagggtcagtgtgagaatacacatccgcatgcatgtctgtccatgtctgtccgtaccaaccttccccttccacacggacctgggcacataggaggtgtctgagcctgacacatgggacagagagtggacatggctgagacacggacagagaaaagacaaggagtccagggggctgaaagccttttgaaatcaggaagttcctgtattggcagaacaaagcccagagaggagcagggctttcctcaacgccacccagcaagtggacacagagcccggccttggatgacacctccagggttctgaaccctggacctcgctttatgcaaggagctggccccacatttccatgaatcggggaaacagcacaagaaggttggcctgtggcagggcaagggttaaaggggtgacattgagggatgcctcagagtcaaagtcccctgaccaagaggaatagagtagaaaacacagagacagagggtgagatcacgccccgatgaggacggagagagacagagatggagagagacatagaggtggaaatatacagagaaagataaatgcagagaccaaggcagggagtgtcgggggaagtaaagagggtgtcctgaagaaagaaggatctgttcactcttaccagtctgtcctcgaatgatttgcataaaatgaggaggtgcctgtccacacccccaattcctctctcaggccccagagcctgagacctcaccatgcccccatcagagatgcaaaaaactaaacacccaactagaaatccttgggacctctctcggctgggatctcagagcctttctgtcccctacccctaccccatgtgctgtcgattttgcagatggggacaacctggggcctcccggaactctgccaccctggggaagttgggggagggccttagtcccggatcacaaccccgtctgctccccagaatcctttcctaagaatcgttgaggaccaaagttgtctttgctgacacgtgttgcttttctctttgccttttattgtttcagagaaaaatcaagttgactgtgtcaagtaacaccccaccccttacccccgtccagccatagtggctctctggagacacaggtcacaggcggagggtcccctgatcatccccaaccacacagccagggggacttgacccctgtccacccctgtctcgtgctccctcagacccccacaaaccggccaagcagtccggggaggcttcccctccacacaactcttagcatgtgattgcagatgtgaaatcaaaacgttgtttgttttttgttttgttttgattctaccccgtcggtccagtgtctgcacagacgccttcatttctctgtaaatatgtgacttggaacaaatgtttaacacaaacgagaagtggtcatgaatgcatggtgttgagatgttttgcactattctgactttttggtctctgtaaaaatattttattaacagcagacattaaaaaaagaaaaaccacacacagccttggacacgtggttgcctcctccttgcattcctttatcagcaaaaaaacaaaaacaaaaacctcacgtacgattagcacctactaggtaggcgcagactcagtagaacacactgcttgcccatgaacgcggctcatccgcaactggagtcatccccattttacagagaaggaaactgaagtacagagagacaagatcttgctcagatcacatagccaggaagagatggagctgggacttgaactcagaacatttgcaaccattgctttttttttttttttttgagatgaagtctctgttgcccaggctggaatgcagtggtgcaatctcagctcactgcaatctccacctcccagattcaagcgattctcctgccttagcctcctgagtagctgggattacaggcgcccgccaccttgcctggctaatttttgtatttttagtagagataggatttcaccatgttggccaggctggtcgcgaacccctgacctcaggtgatccactccctcggcctcccaaagtgctgggattacaggcgtgagccaccgcacccggccatctgttgcccttaaggaagttaagatacaaacactaggaatacatgcccttaattcaacccacacccccatgcttgtttggttttgttgggttttttgggatcttcttgtttgtttgtttttgagacagggtcttgctctgtcacccaggatggagttcagtgtcacaatctcaactcactgcatcctcaacctcccaggctcaggtgatcctcccacctcagcctcctgagtagtgtgcaccaccacacctggctaatttgtgtattttttgtagtgataggatgtcgccatgttgcccagactgctctcgaactcctcactttgggcaatcctctctcctcagccctccaaagtgttgggattacaggcgtgagccactgtgcctggccatgtctgttttaaatgtagcagctggggccaggcgcagtggctcacgcctgtaatcccagcactttaggaggccgaggcgggtggatcacgaggtcaggagatcgagaccatcctggctaacacggtgaaaccccgtctctactaaaagtaccaaaaattagccgggcacggtggcaggcacctgtagttccagctactcgggaggctgaggcaggagaatggtgtgaactggggaggcggagcttgcagtgagccaagatcacgccactgcattccagcctgggtgacggagcgagactccatctcaaaaaaaaaaaaagaaaaaaaagtagcagctgggaatctcatttcataaactcagatgtgtgaggaatgaaactccattttccaacagctgaatttaatttctgttttgagtctccatcccacgaggaagcagaaatggaatctcattcagcccagtttcctcggtaaattccgaaattcccctccttatgtctggggttatttctacatttgagcggacaggacgggagctgcgggatccaccaccaggagtgggttcagtgagtgcttttggttgcaagtaacagacagcaggactaaaagtggggccagaaagtggcttacaccaggagttatccagcacgcagcaatcccgctcctgggggacttttctcctttgagaaacttgcacgtgggggtgtggtatcttctcaaagaatagcatatagctgggaaaaggggacaaaccgcagctgtctgcatgatgtctgcagaggcagcctgcaggtccttgagtgcccctgctcattagctgtttctgtacccaagtgcataggctacgcactgtgactgatgtggatctatttgcccctcgctacaaaagggtctcaagtcttgtccttcagtgtgtgggacccatcgtgttaccaatggggcttggggactgaggctcaagactgcttgctgggaaatgtaacccctttgttctggacaggtagaaggagaggagaatggtcatccaggcctaatgtaaagtttctgcaaccc

SEQ ID NO: 9595-9662 - skipped (68 entries)

SEQ ID NO: 9663 - RNA, 25 nt, synthetic construct
  source 1..25: mol_type = other RNA
  modified_base 7: mod_base = OTHER; note = A nucleoside-replacement group characterized by the lack of a nucleotide base
  modified_base 19: mod_base = OTHER; note = A nucleoside-replacement group characterized by the lack of a nucleotide base
gggcagncaggaatggtgngtggaa

SEQ ID NO: 9664 - RNA, 25 nt, synthetic construct
  source 1..25: mol_type = other RNA
  modified_base 7: mod_base = OTHER; note = A nucleoside-replacement group characterized by the lack of a nucleotide base
  modified_base 19: mod_base = OTHER; note = A nucleoside-replacement group characterized by the lack of a nucleotide base
agggagnagttttccaggnaaaggg

SEQ ID NO: 9665 - RNA, 25 nt, synthetic construct
  source 1..25: mol_type = other RNA
  modified_base 7: mod_base = OTHER; note = A nucleoside-replacement group characterized by the lack of a nucleotide base
  modified_base 19: mod_base = OTHER; note = A nucleoside-replacement group characterized by the lack of a nucleotide base
gcagctngaagagacatanccagac

SEQ ID NO: 9666 - RNA, 25 nt, synthetic construct
  source 1..25: mol_type = other RNA
  modified_base 7: mod_base = OTHER; note = A nucleoside-replacement group characterized by the lack of a nucleotide base
  modified_base 19: mod_base = OTHER; note = A nucleoside-replacement group characterized by the lack of a nucleotide base
tccaccngccactcacaancatcca

SEQ ID NO: 9667 - RNA, 25 nt, synthetic construct
  source 1..25: mol_type = other RNA
  modified_base 7: mod_base = OTHER; note = A nucleoside-replacement group characterized by the lack of a nucleotide base
  modified_base 19: mod_base = OTHER; note = A nucleoside-replacement group characterized by the lack of a nucleotide base
gaaagtntcatggagagtncaaggg

SEQ ID NO: 9668 - RNA, 25 nt, synthetic construct
  source 1..25: mol_type = other RNA
  modified_base 9: mod_base = OTHER; note = A nucleoside-replacement group characterized by the lack of a nucleotide base
  modified_base 19: mod_base = OTHER; note = A nucleoside-replacement group characterized by the lack of a nucleotide base
gggcaggcnggaatggtgngtggaa

SEQ ID NO: 9669 - RNA, 25 nt, synthetic construct
  source 1..25: mol_type = other RNA
  modified_base 9: mod_base = OTHER; note = A nucleoside-replacement group characterized by the lack of a nucleotide base
  modified_base 19: mod_base = OTHER; note = A nucleoside-replacement group characterized by the lack of a nucleotide base
agggagganttttccaggnaaaggg

SEQ ID NO: 9670 - RNA, 25 nt, synthetic construct
  source 1..25: mol_type = other RNA
  modified_base 9: mod_base = OTHER; note = A nucleoside-replacement group characterized by the lack of a nucleotide base
  modified_base 19: mod_base = OTHER; note = A nucleoside-replacement group characterized by the lack of a nucleotide base
gcagctggnagagacatanccagac

SEQ ID NO: 9671 - RNA, 25 nt, synthetic construct
  source 1..25: mol_type = other RNA
  modified_base 9: mod_base = OTHER; note = A nucleoside-replacement group characterized by the lack of a nucleotide base
  modified_base 19: mod_base = OTHER; note = A nucleoside-replacement group characterized by the lack of a nucleotide base
tccaccagncactcacaancatcca

SEQ ID NO: 9672 - RNA, 25 nt, synthetic construct
  source 1..25: mol_type = other RNA
  modified_base 9: mod_base = OTHER; note = A nucleoside-replacement group characterized by the lack of a nucleotide base
  modified_base 19: mod_base = OTHER; note = A nucleoside-replacement group characterized by the lack of a nucleotide base
gaaagtgtnatggagagtncaaggg

SEQ ID NO: 9673 - RNA, 23 nt, synthetic construct
  source 1..23: mol_type = other RNA
  modified_base 8: mod_base = OTHER; note = A nucleoside-replacement group characterized by the lack of a nucleotide base
  modified_base 16: mod_base = OTHER; note = A nucleoside-replacement group characterized by the lack of a nucleotide base
gcaggcangaatggtnagtggaa

SEQ ID NO: 9674 - RNA, 23 nt, synthetic construct
  source 1..23: mol_type = other RNA
  modified_base 8: mod_base = OTHER; note = A nucleoside-replacement group characterized by the lack of a nucleotide base
  modified_base 16: mod_base = OTHER; note = A nucleoside-replacement group characterized by the lack of a nucleotide base
gggcaggnaggaatgntgagtgg

SEQ ID NO: 9675 - RNA, 23 nt, synthetic construct
  source 1..23: mol_type = other RNA
  modified_base 8: mod_base = OTHER; note = A nucleoside-replacement group characterized by the lack of a nucleotide base
  modified_base 16: mod_base = OTHER; note = A nucleoside-replacement group characterized by the lack of a nucleotide base
ggcaggcnggaatggngagtgga

SEQ ID NO: 9676 - RNA, 23 nt, synthetic construct
  source 1..23: mol_type = other RNA
  modified_base 8: mod_base = OTHER; note = A nucleoside-replacement group characterized by the lack of a nucleotide base
  modified_base 16: mod_base = OTHER; note = A nucleoside-replacement group characterized by the lack of a nucleotide base
gtaaaggnaatggcanggcgggc

SEQ ID NO: 9677 - RNA, 23 nt, synthetic construct
  source 1..23: mol_type = other RNA
  modified_base 8: mod_base = OTHER; note = A nucleoside-replacement group characterized by the lack of a nucleotide base
  modified_base 16: mod_base = OTHER; note = A nucleoside-replacement group characterized by the lack of a nucleotide base
aggtaaanggaatggnatggcgg

SEQ ID NO: 9678 - RNA, 23 nt, synthetic construct
  source 1..23: mol_type = other RNA
  modified_base 8: mod_base = OTHER; note = A nucleoside-replacement group characterized by the lack of a nucleotide base
  modified_base 16: mod_base = OTHER; note = A nucleoside-replacement group characterized by the lack of a nucleotide base
ggtaaagngaatggcntggcggg

SEQ ID NO: 9679 - RNA, 23 nt, synthetic construct
  source 1..23: mol_type = other RNA
  modified_base 8: mod_base = OTHER; note = A nucleoside-replacement group characterized by the lack of a nucleotide base
  modified_base 16: mod_base = OTHER; note = A nucleoside-replacement group characterized by the lack of a nucleotide base
aggaggtnaccctgantctggac

SEQ ID NO: 9680 - RNA, 23 nt, synthetic construct
  source 1..23: mol_type = other RNA
  modified_base 8: mod_base = OTHER; note = A nucleoside-replacement group characterized by the lack of a nucleotide base
  modified_base 16: mod_base = OTHER; note = A nucleoside-replacement group characterized by the lack of a nucleotide base
agaggagntgaccctnaatctgg

SEQ ID NO: 9681 - RNA, 23 nt, synthetic construct
  source 1..23: mol_type = other RNA
  modified_base 8: mod_base = OTHER; note = A nucleoside-replacement group characterized by the lack of a nucleotide base
  modified_base 16: mod_base = OTHER; note = A nucleoside-replacement group characterized by the lack of a nucleotide base
gaggaggngaccctgnatctgga

SEQ ID NO: 9682 - RNA, 23 nt, synthetic construct
  source 1..23: mol_type = other RNA
  modified_base 8: mod_base = OTHER; note = A nucleoside-replacement group characterized by the lack of a nucleotide base
  modified_base 16: mod_base = OTHER; note = A nucleoside-replacement group characterized by the lack of a nucleotide base
acaaacgncccaatcntgagtgg

SEQ ID NO: 9683 - RNA, 23 nt, synthetic construct
  source 1..23: mol_type = other RNA
  modified_base 8: mod_base = OTHER; note = A nucleoside-replacement group characterized by the lack of a nucleotide base
  modified_base 16: mod_base = OTHER; note = A nucleoside-replacement group characterized by the lack of a nucleotide base
acacaaanggcccaancctgagt

SEQ ID NO: 9684 - RNA, 23 nt, synthetic construct
  source 1..23: mol_type = other RNA
  modified_base 8: mod_base = OTHER; note = A nucleoside-replacement group characterized by the lack of a nucleotide base
  modified_base 16: mod_base = OTHER; note = A nucleoside-replacement group characterized by the lack of a nucleotide base
cacaaacngcccaatnctgagtg

SEQ ID NO: 9685 - RNA, 23 nt, synthetic construct
  source 1..23: mol_type = other RNA
  modified_base 8: mod_base = OTHER; note = A nucleoside-replacement group characterized by the lack of a nucleotide base
  modified_base 16: mod_base = OTHER; note = A nucleoside-replacement group characterized by the lack of a nucleotide base
tctttccnggaaaccnaggcagc

SEQ ID NO: 9686 - RNA, 23 nt, synthetic construct
  source 1..23: mol_type = other RNA
  modified_base 8: mod_base = OTHER; note = A nucleoside-replacement group characterized by the lack of a nucleotide base
  modified_base 16: mod_base = OTHER; note = A nucleoside-replacement group characterized by the lack of a nucleotide base
gttctttncaggaaanccaggca

SEQ ID NO: 9687 - RNA, 23 nt, synthetic construct
  source 1..23: mol_type = other RNA
  modified_base 8: mod_base = OTHER; note = A nucleoside-replacement group characterized by the lack of a nucleotide base
  modified_base 16: mod_base = OTHER; note = A nucleoside-replacement group characterized by the lack of a nucleotide base
ttctttcnaggaaacncaggcag

SEQ ID NO: 9688 - RNA, 23 nt, synthetic construct
  source 1..23: mol_type = other RNA
  modified_base 8: mod_base = OTHER; note = A nucleoside-replacement group characterized by the lack of a nucleotide base
  modified_base 16: mod_base = OTHER; note = A nucleoside-replacement group characterized by the lack of a nucleotide base
tccgcaanttaatccncctaccc

SEQ ID NO: 9689 - RNA, 23 nt, synthetic construct
  source 1..23: mol_type = other RNA
  modified_base 8: mod_base = OTHER; note = A nucleoside-replacement group characterized by the lack of a nucleotide base
  modified_base 16: mod_base = OTHER; note = A nucleoside-replacement group characterized by the lack of a nucleotide base
gatccgcnacttaatncacctac

SEQ ID NO: 9690 - RNA, 23 nt, synthetic construct
  source 1..23: mol_type = other RNA
  modified_base 8: mod_base = OTHER; note = A nucleoside-replacement group characterized by the lack of a nucleotide base
  modified_base 16: mod_base = OTHER; note = A nucleoside-replacement group characterized by the lack of a nucleotide base
atccgcancttaatcnacctacc

SEQ ID NO: 9691 - RNA, 23 nt, synthetic construct
  source 1..23: mol_type = other RNA
  modified_base 8: mod_base = OTHER; note = A nucleoside-replacement group characterized by the lack of a nucleotide base
  modified_base 16: mod_base = OTHER; note = A nucleoside-replacement group characterized by the lack of a nucleotide base
cccacccntctaactnccccaaa

SEQ ID NO: 9692 - RNA, 23 nt, synthetic construct
  source 1..23: mol_type = other RNA
  modified_base 8: mod_base = OTHER; note = A nucleoside-replacement group characterized by the lack of a nucleotide base
  modified_base 16: mod_base = OTHER; note = A nucleoside-replacement group characterized by the lack of a nucleotide base
cacccacncatctaantacccca

SEQ ID NO: 9693 - RNA, 23 nt, synthetic construct
  source 1..23: mol_type = other RNA
  modified_base 8: mod_base = OTHER; note = A nucleoside-replacement group characterized by the lack of a nucleotide base
  modified_base 16: mod_base = OTHER; note = A nucleoside-replacement group characterized by the lack of a nucleotide base
acccaccnatctaacnaccccaa

SEQ ID NO: 9694 - RNA, 23 nt, synthetic construct
  source 1..23: mol_type = other RNA
  modified_base 8: mod_base = OTHER; note = A nucleoside-replacement group characterized by the lack of a nucleotide base
  modified_base 16: mod_base = OTHER; note = A nucleoside-replacement group characterized by the lack of a nucleotide base
aagtgtcntggagagngcaaggg

SEQ ID NO: 9695 - RNA, 23 nt, synthetic construct
  source 1..23: mol_type = other RNA
  modified_base 8: mod_base = OTHER; note = A nucleoside-replacement group characterized by the lack of a nucleotide base
  modified_base 16: mod_base = OTHER; note = A nucleoside-replacement group characterized by the lack of a nucleotide base
gaaagtgncatggagngtgcaag

SEQ ID NO: 9696 - RNA, 23 nt, synthetic construct
  source 1..23: mol_type = other RNA
  modified_base 8: mod_base = OTHER; note = A nucleoside-replacement group characterized by the lack of a nucleotide base
  modified_base 16: mod_base = OTHER; note = A nucleoside-replacement group characterized by the lack of a nucleotide base
aaagtgtnatggagantgcaagg

SEQ ID NO: 9697 - RNA, 20 nt, synthetic construct
  source 1..20: mol_type = other RNA
  misc_feature 1..20: note = Phosphorothioate linkage
  modified_base 1..20: mod_base = OTHER; note = 2'-O-(2-methoxyethyl) ribonucleotide
  modified_base 4: mod_base = OTHER; note = 5-methyl cytosine
  modified_base 6: mod_base = OTHER; note = 5-methyl cytosine
  modified_base 11: mod_base = OTHER; note = 5-methyl cytosine
  modified_base 17: mod_base = OTHER; note = 5-methyl cytosine
attcactttcataatgctgg

SEQ ID NO: 9698 - RNA, 1481 nt, Homo sapiens
  source 1..1481: mol_type = mRNA
gcacccgcgggtttgctatggcgatgagcagcggcggcagtggtggcggcgtcccggagcaggaggattccgtgctgttccggcgcggcacaggccagagcgatgattctgacatttgggatgatacagcactgataaaagcatatgataaagctgtggcttcatttaagcatgctctaaagaatggtgacatttgtgaaacttcgggtaaaccaaaaaccacacctaaaagaaaacctgctaagaagaataaaagccaaaagaagaatactgcagcttccttacaacagtggaaagttggggacaaatgttctgccatttggtcagaagacggttgcatttacccagctaccattgcttcaattgattttaagagagaaacctgtgttgtggtttacactggatatggaaatagagaggagcaaaatctgtccgatctactttccccaatctgtgaagtagctaataatatagaacaaaatgctcaagagaatgaaaatgaaagccaagtttcaacagatgaaagtgagaactccaggtctcctggaaataaatcagataacatcaagcccaaatctgctccatggaactcttttctccctccaccaccccccatgccagggccaagactgggaccaggaaagccaggtctaaaattcaatggcccaccaccgccaccgccaccaccaccaccccacttactatcatgctggctgcctccatttccttctggaccaccaataattcccccaccacctcccatatgtccagattctcttgatgatgctgatgctttgggaagtatgttaatttcatggtacatgagtggctatcatactggctattatatgggttttagacaaaatcaaaaagaaggaaggtgctcacattccttaaattaaggagaaatgctggcatagagcagcactaaatgacaccactaaagaaacgatcagacagatctggaatgtgaagcgttatagaagataactggcctcatttcttcaaaatatcaagtgttgggaaagaaaaaaggaagtggaatgggtaactcttcttgattaaaagttatgtaataaccaaatgcaatgtgaaatattttactggactctattttgaaaaaccatctgtaaaagactgaggtgggggtgggaggccagcacggtggtgaggcagttgagaaaatttgaatgtggattagattttgaatgatattggataattattggtaattttatgagctgtgaaagggtgttgtagtttataaaagactgtcttaatttgcatacttaagcatttaggaatgaagtgttagagtgtcttaaaatgtttcaaatggtttaacaaaatgtatgtgaggcgtatgtggcaaaatgttacagaatctaactggtggacatggctgttcattgtactgtttttttctatcttctatatgtttaaaagtatataataaaaatatttaatttttttttaaatta

SEQ ID NO: 9699 - RNA, 1428 nt, Homo sapiens
  source 1..1428: mol_type = mRNA
gcacccgcgggtttgctatggcgatgagcagcggcggcagtggtggcggcgtcccggagcaggaggattccgtgctgttccggcgcggcacaggccagagcgatgattctgacatttgggatgatacagcactgataaaagcatatgataaagctgtggcttcatttaagcatgctctaaagaatggtgacatttgtgaaacttcgggtaaaccaaaaaccacacctaaaagaaaacctgctaagaagaataaaagccaaaagaagaatactgcagcttccttacaacagtggaaagttggggacaaatgttctgccatttggtcagaagacggttgcatttacccagctaccattgcttcaattgattttaagagagaaacctgtgttgtggtttacactggatatggaaatagagaggagcaaaatctgtccgatctactttccccaatctgtgaagtagctaataatatagaacaaaatgctcaagagaatgaaaatgaaagccaagtttcaacagatgaaagtgagaactccaggtctcctggaaataaatcagataacatcaagcccaaatctgctccatggaactcttttctccctccaccaccccccatgccagggccaagactgggaccaggaaagccaggtctaaaattcaatggcccaccaccgccaccgccaccaccaccaccccacttactatcatgctggctgcctccatttccttctggaccaccaataattcccccaccacctcccatatgtccagattctcttgatgatgctgatgctttgggaagtatgttaatttcatggtacatgagtggctatcatactggctattatatggaaatgctggcatagagcagcactaaatgacaccactaaagaaacgatcagacagatctggaatgtgaagcgttatagaagataactggcctcatttcttcaaaatatcaagtgttgggaaagaaaaaaggaagtggaatgggtaactcttcttgattaaaagttatgtaataaccaaatgcaatgtgaaatattttactggactctattttgaaaaaccatctgtaaaagactgaggtgggggtgggaggccagcacggtggtgaggcagttgagaaaatttgaatgtggattagattttgaatgatattggataattattggtaattttatgagctgtgagaagggtgttgtagtttataaaagactgtcttaatttgcatacttaagcatttaggaatgaagtgttagagtgtcttaaaatgtttcaaatggtttaacaaaatgtatgtgaggcgtatgtggcaaaatgttacagaatctaactggtggacatggctgttcattgtactgtttttttctatcttctatatgtttaaaagtatataataaaaatatttaatttttttttaaatta

SEQ ID NO: 9700 - RNA, 1538 nt, Homo sapiens
  source 1..1538: mol_type = mRNA
ccacaaatgtgggagggcgataaccactcgtagaaagcgtgagaagttactacaagcggtcctcccggccaccgtactgttccgctcccagaagccccgggcggcggaagtcgtcactcttaagaagggacggggccccacgctgcgcacccgcgggtttgctatggcgatgagcagcggcggcagtggtggcggcgtcccggagcaggaggattccgtgctgttccggcgcggcacaggccagagcgatgattctgacatttgggatgatacagcactgataaaagcatatgataaagctgtggcttcatttaagcatgctctaaagaatggtgacatttgtgaaacttcgggtaaaccaaaaaccacacctaaaagaaaacctgctaagaagaataaaagccaaaagaagaatactgcagcttccttacaacagtggaaagttggggacaaatgttctgccatttggtcagaagacggttgcatttacccagctaccattgcttcaattgattttaagagagaaacctgtgttgtggtttacactggatatggaaatagagaggagcaaaatctgtccgatctactttccccaatctgtgaagtagctaataatatagaacaaaatgctcaagagaatgaaaatgaaagccaagtttcaacagatgaaagtgagaactccaggtctcctggaaataaatcagataacatcaagcccaaatctgctccatggaactcttttctccctccaccaccccccatgccagggccaagactgggaccaggaaagataattcccccaccacctcccatatgtccagattctcttgatgatgctgatgctttgggaagtatgttaatttcatggtacatgagtggctatcatactggctattatatgggttttagacaaaatcaaaaagaaggaaggtgctcacattccttaaattaaggagaaatgctggcatagagcagcactaaatgacaccactaaagaaacgatcagacagatctggaatgtgaagcgttatagaagataactggcctcatttcttcaaaatatcaagtgttgggaaagaaaaaaggaagtggaatgggtaactcttcttgattaaaagttatgtaataaccaaatgcaatgtgaaatattttactggactctattttgaaaaaccatctgtaaaagactgaggtgggggtgggaggccagcacggtggtgaggcagttgagaaaatttgaatgtggattagattttgaatgatattggataattattggtaattttatgagctgtgagaagggtgttgtagtttataaaagactgtcttaatttgcatacttaagcatttaggaatgaagtgttagagtgtcttaaaatgtttcaaatggtttaacaaaatgtatgtgaggcgtatgtggcaaaatgttacagaatctaactggtggacatggctgttcattgtactgtttttttctatcttctatatgtttaaaagtatataataaaaatatttaatttttttttaaattaaaaaaa

SEQ ID NO: 9701 - RNA, 1484 nt, Homo sapiens
  source 1..1484: mol_type = mRNA
ccacaaatgtgggagggcgataaccactcgtagaaagcgtgagaagttactacaagcggtcctcccggccaccgtactgttccgctcccagaagccccgggcggcggaagtcgtcactcttaagaagggacggggccccacgctgcgcacccgcgggtttgctatggcgatgagcagcggcggcagtggtggcggcgtcccggagcaggaggattccgtgctgttccggcgcggcacaggccagagcgatgattctgacatttgggatgatacagcactgataaaagcatatgataaagctgtggcttcatttaagcatgctctaaagaatggtgacatttgtgaaacttcgggtaaaccaaaaaccacacctaaaagaaaacctgctaagaagaataaaagccaaaagaagaatactgcagcttccttacaacagtggaaagttggggacaaatgttctgccatttggtcagaagacggttgcatttacccagctaccattgcttcaattgattttaagagagaaacctgtgttgtggtttacactggatatggaaatagagaggagcaaaatctgtccgatctactttccccaatctgtgaagtagctaataatatagaacaaaatgctcaagagaatgaaaatgaaagccaagtttcaacagatgaaagtgagaactccaggtctcctggaaataaatcagataacatcaagcccaaatctgctccatggaactcttttctccctccaccaccccccatgccagggccaagactgggaccaggaaagataattcccccaccacctcccatatgtccagattctcttgatgatgctgatgctttgggaagtatgttaatttcatggtacatgagtggctatcatactggctattatatggaaatgctggcatagagcagcactaaatgacaccactaaagaaacgatcagacagatctggaatgtgaagcgttatagaagataactggcctcatttcttcaaaatatcaagtgttgggaaagaaaaaaggaagtggaatgggtaactcttcttgattaaaagttatgtaataaccaaatgcaatgtgaaatattttactggactctattttgaaaaaccatctgtaaaagactgaggtgggggtgggaggccagcacggtggtgaggcagttgagaaaatttgaatgtggattagattttgaatgatattggataattattggtaattttatgagctgtgagaagggtgttgtagtttataaaagactgtcttaatttgcatacttaagcatttaggaatgaagtgttagagtgtcttaaaatgtttcaaatggtttaacaaaatgtatgtgaggcgtatgtggcaaaatgttacagaatctaactggtggacatggctgttcattgtactgtttttttctatcttctatatgtttaaaagtatataataaaaatatttaatttttttttaaattaaaaaaa

SEQ ID NO: 9702 - RNA, 1229 nt, Homo sapiens
  source 1..1229: mol_type = mRNA
ggcggaagtcgtcactcttaagaagggacggggccccacgctgcgcacccgcgggtttgctatggcgatgagcagcggcggcagtggtggcggcgtcccggagcaggaggattccgtgctgttccggcgcggcacaggccagagcgatgattctgacatttgggatgatacagcactgataaaagcatatgataaagctgtggcttcatttaagcatgctctaaagaatggtgacatttgtgaaacttcgggtaaaccaaaaaccacacctaaaagaaaacctgctaagaagaataaaagccaaaagaagaatactgcagcttccttacaacagaatgaaaatgaaagccaagtttcaacagatgaaagtgagaactccaggtctcctggaaataaatcagataacatcaagcccaaatctgctccatggaactcttttctccctccaccaccccccatgccagggccaagactgggaccaggaaagataattcccccaccacctcccatatgtccagattctcttgatgatgctgatgctttgggaagtatgttaatttcatggtacatgagtggctatcatactggctattatatgggttttagacaaaatcaaaaagaaggaaggtgctcacattccttaaattaaggagaaatgctggcatagagcagcactaaatgacaccactaaagaaacgatcagacagatctggaatgtgaagcgttatagaagataactggcctcatttcttcaaaatatcaagtgttgggaaagaaaaaaggaagtggaatgggtaactcttcttgattaaaagttatgtaataaccaaatgcaatgtgaaatattttactggactctattttgaaaaaccatctgtaaaagactgaggtgggggtgggaggccagcacggtggtgaggcagttgagaaaatttgaatgtggattagattttgaatgatattggataattattggtaattttatgagctgtgagaagggtgttgtagtttataaaagactgtcttaatttgcatacttaagcatttaggaatgaagtgttagagtgtcttaaaatgtttcaaatggtttaacaaaatgtatgtgaggcgtatgtggcaaaatgttacagaatctaactggtggacatggctgttcattgtactgtttttttctatcttctatatgtttaaaagtatataataaaaatatttaatttttttttaaatta

SEQ ID NO: 9703 - RNA, 1175 nt, Homo sapiens
  source 1..1175: mol_type = mRNA
ggcggaagtcgtcactcttaagaagggacggggccccacgctgcgcacccgcgggtttgctatggcgatgagcagcggcggcagtggtggcggcgtcccggagcaggaggattccgtgctgttccggcgcggcacaggccagagcgatgattctgacatttgggatgatacagcactgataaaagcatatgataaagctgtggcttcatttaagcatgctctaaagaatggtgacatttgtgaaacttcgggtaaaccaaaaaccacacctaaaagaaaacctgctaagaagaataaaagccaaaagaagaatactgcagcttccttacaacagaatgaaaatgaaagccaagtttcaacagatgaaagtgagaactccaggtctcctggaaataaatcagataacatcaagcccaaatctgctccatggaactcttttctccctccaccaccccccatgccagggccaagactgggaccaggaaagataattcccccaccacctcccatatgtccagattctcttgatgatgctgatgctttgggaagtatgttaatttcatggtacatgagtggctatcatactggctattatatggaaatgctggcatagagcagcactaaatgacaccactaaagaaacgatcagacagatctggaatgtgaagcgttatagaagataactggcctcatttcttcaaaatatcaagtgttgggaaagaaaaaaggaagtggaatgggtaactcttcttgattaaaagttatgtaataaccaaatgcaatgtgaaatattttactggactctattttgaaaaaccatctgtaaaagactgaggtgggggtgggaggccagcacggtggtgaggcagttgagaaaatttgaatgtggattagattttgaatgatattggataattattggtaattttatgagctgtgagaagggtgttgtagtttataaaagactgtcttaatttgcatacttaagcatttaggaatgaagtgttagagtgtcttaaaatgtttcaaatggtttaacaaaatgtatgtgaggcgtatgtggcaaaatgttacagaatctaactggtggacatggctgttcattgtactgtttttttctatcttctatatgtttaaaagtatataataaaaatatttaatttttttttaaatta

SEQ ID NO: 9704 - RNA, 1312 nt, Homo sapiens
  source 1..1312: mol_type = mRNA
actcttaagaagggacggggccccacgctgcgcacccgcgggtttgctatggcgatgagcagcggcggcagtggtggcggcgtcccggagcaggaggattccgtgctgttccggcgcggcacaggccagagcgatgattctgacatttgggatgatacagcactgataaaagcatatgataaagctgtggcttcatttaagcatgctctaaagaatggtgacatttgtgaaacttcgggtaaaccaaaaaccacacctaaaagaaaacctgctaagaagaataaaagccaaaagaagaatactgcagcttccttacaacagaatgaaaatgaaagccaagtttcaacagatgaaagtgagaactccaggtctcctggaaataaatcagataacatcaagcccaaatctgctccatggaactcttttctccctccaccaccccccatgccagggccaagactgggaccaggaaagccaggtctaaaattcaatggcccaccaccgccaccgccaccaccaccaccccacttactatcatgctggctgcctccatttccttctggaccaccaataattcccccaccacctcccatatgtccagattctcttgatgatgctgatgctttgggaagtatgttaatttcatggtacatgagtggctatcatactggctattatatgggttttagacaaaatcaaaaagaaggaaggtgctcacattccttaaattaaggagaaatgctggcatagagcagcactaaatgacaccactaaagaaacgatcagacagatctggaatgtgaagcgttatagaagataactggcctcatttcttcaaaatatcaagtgttgggaaagaaaaaaggaagtggaatgggtaactcttcttgattaaaagttatgtaataaccaaatgcaatgtgaaatattttactggactctattttgaaaaaccatctgtaaaagactgaggtgggggtgggaggccagcacggtggtgaggcagttgagaaaatttgaatgtggattagattttgaatgatattggataattattggtaattttatgagctgtgagaagggtgttgtagtttataaaagactgtcttaatttgcatacttaagcatttaggaatgaagtgttagagtgtcttaaaatgtttcaaatggtttaacaaaatgtatgtgaggcgtatgtggcaaaatgttacagaatctaactggtggacatggctgttcattgtactgtttttttctatcttctatatgtttaaaagtatataataaaaatatttaatttttttttaaatta

SEQ ID NO: 9705 - RNA, 1258 nt, Homo sapiens
  source 1..1258: mol_type = mRNA
actcttaagaagggacggggccccacgctgcgcacccgcgggtttgctatggcgatgagcagcggcggcagtggtggcggcgtcccggagcaggaggattccgtgctgttccggcgcggcacaggccagagcgatgattctgacatttgggatgatacagcactgataaaagcatatgataaagctgtggcttcatttaagcatgctctaaagaatggtgacatttgtgaaacttcgggtaaaccaaaaaccacacctaaaagaaaacctgctaagaagaataaaagccaaaagaagaatactgcagcttccttacaacagaatgaaaatgaaagccaagtttcaacagatgaaagtgagaactccaggtctcctggaaataaatcagataacatcaagcccaaatctgctccatggaactcttttctccctccaccaccccccatgccagggccaagactgggaccaggaaagccaggtctaaaattcaatggcccaccaccgccaccgccaccaccaccaccccacttactatcatgctggctgcctccatttccttctggaccaccaataattcccccaccacctcccatatgtccagattctcttgatgatgctgatgctttgggaagtatgttaatttcatggtacatgagtggctatcatactggctattatatggaaatgctggcatagagcagcactaaatgacaccactaaagaaacgatcagacagatctggaatgtgaagcgttatagaagataactggcctcatttcttcaaaatatcaagtgttgggaaagaaaaaaggaagtggaatgggtaactcttcttgattaaaagttatgtaataaccaaatgcaatgtgaaatattttactggactctattttgaaaaaccatctgtaaaagactgaggtgggggtgggaggccagcacggtggtgaggcagttgagaaaatttgaatgtggattagattttgaatgatattggataattattggtaattttatgagctgtgagaagggtgttgtagtttataaaagactgtcttaatttgcatacttaagcatttaggaatgaagtgttagagtgtcttaaaatgtttcaaatggtttaacaaaatgtatgtgaggcgtatgtggcaaaatgttacagaatctaactggtggacatggctgttcattgtactgtttttttctatcttctatatgtttaaaagtatataataaaaatatttaatttttttttaaatta

SEQ ID NO: 9706 - RNA, 1094 nt, Homo sapiens
  source 1..1094: mol_type = mRNA
aagaagggacggggccccacgctgcgcacccgcgggtttgctatggcgatgagcagcggcggcagtggtggcggcgtcccggagcaggaggattccgtgctgttccggcgcggcacaggccagagcgatgattctgacatttgggatgatacagcactgataaaagcatatgataaagctgtggcttcatttaagcatgctctaaagaatggtgacatttgtgaaacttcgggtaaaccaaaaaccacacctaaaagaaaacctgctaagaagaataaaagccaaaagaagaatactgcagcttccttacaacagtggaaagttggggacaaatgttctgccatttggtcagaagacggttgcatttacccagctaccattgcttcaattgattttaagagagaaacctgtgttgtggtttacactggatatggaaatagagaggagcaaaatctgtccgatctactttccccaatctgtgaagtagctaataatatagaacaaaatgctcaagagaatgaaaatgaaagccaagtttcaacagatgaaagtgagaactccaggtctcctggaaataaatcagataacatcaagcccaaatctgctccatggaactcttttctccctccaccaccccccatgccagggccaagactgggaccaggaaagccaggtctaaaattcaatggcccaccaccgccaccgccaccaccaccaccccacttactatcatgctggctgcctccatttccttctggaccaccaataattcccccaccacctcccatatgtccagattctcttgatgatgctgatgctttgggaagtatgttaatttcatggtacatgagtggctatcatactggctattatatgacagggtttcactgtgttagccaggatggtctcaatctcctgaccccgtgatccacccgcctcggccttccaagagaaatgaaatttttttaatgcacaaagatctggggtaatgtgtaccacattgaaccttggggagtatggcttcaaacttgtcactttatacgttagtctcctacggacatgttctattgtattttagtcagaacatttaaaat

SEQ ID NO: 9707 - RNA, 1090 nt, Homo sapiens
  source 1..1090: mol_type = mRNA
aagaagggacggggccccacgctgcgcacccgcgggtttgctatggcgatgagcagcggcggcagtggtggcggcgtcccggagcaggaggattccgtgctgttccggcgcggcacaggccagagcgatgattctgacatttgggatgatacagcactgataaaagcatatgataaagctgtggcttcatttaagcatgctctaaagaatggtgacatttgtgaaacttcgggtaaaccaaaaaccacacctaaaagaaaacctgctaagaagaataaaagccaaaagaagaatactgcagcttccttacaacagtggaaagttggggacaaatgttctgccatttggtcagaagacggttgcatttacccagctaccattgcttcaattgattttaagagagaaacctgtgttgtggtttacactggatatggaaatagagaggagcaaaatctgtccgatctactttccccaatctgtgaagtagctaataatatagaacaaaatgctcaagagaatgaaaatgaaagccaagtttcaacagatgaaagtgagaactccaggtctcctggaaataaatcagataacatcaagcccaaatctgctccatggaactcttttctccctccaccaccccccatgccagggccaagactgggaccaggaaagccaggtctaaaattcaatggcccaccaccgccaccgccaccaccaccaccccacttactatcatgctggctgcctccatttccttctggaccaccaataattcccccaccacctcccatatgtccagattctcttgatgatgctgatgctttgggaagtatgttaatttcatggtacatgagtggctatcatactggctattatatgggtttcactgtgttagccaggatggtctcaatctcctgaccccgtgatccacccgcctcggccttccaagagaaatgaaatttttttaatgcacaaagatctggggtaatgtgtaccacattgaaccttggggagtatggcttcaaacttgtcactttatacgttagtctcctacggacatgttctattgtattttagtcagaacatttaaaat

SEQ ID NO: 9708 - DNA, 35073 bp, Homo sapiens
  source 1..35073: mol_type = genomic DNA
tctgattggtgagcgatggtggtaggtaaaaccagtcttagagtcatggcagttcattttagcagctattaggtaaaactggtcttagggatacagaaggctggttcagcagttggacttgtggaaaatttaattcttgaagcagatgctgtgtgccccgaatgcttcttccccctggcccttcaactctgatttagttgagtatttcaagaatgacccaatttatgtaatcaactttcacaggtatacatgtcttaaactttaaacagatgttttgggttttgttgttgttgtttttgagacggagtctcactctgttgtccaagctggagtgtagtggtgtgatctcggctcactgcaacctccgcctccagggtcaagtgattctccagcctcagcctcctgaatagctgggattacaggcgcccgccaccacgcccagctaatttttgtatttttagtagagatggggtggggtttcaccatgttggccaggctggtcttgaactcctgacatcaagtgttctgctcacctcagcctctgaaagtgctgggattacaggcgtgagccactgcgcccggcagtctttccttcttttttttttttttttttttttttttaatgacatggggtcttactttattactcaggctggtctcaaacttctggcctcaaggaatcttcccaccttggcctcccaaattgctgggattacaggcataagtcatcatgcctggctacaaacagatattttcaataagaggataaaagttcatttccccatactttgctaacatcaaatgttattaattcctaatagttttgccaaactgagaggaaaatggtatgttagtttttctgggttttctttctttttaattttttttcttttttattcatcgcaacactattcacgatttttttattttttattttatttatttatttatttttttttgagacaaggtctccctatgttgcccaggctggtcttgtacccctgggctcaaaggatcctcctgcctcagcctcccaaagtgctaggattacaggcatgagtcaccacgcctggttcacaatttctttttgtttttaccaaaggcaggtatattcctgaaattttttgtttttttgttttttttttgagatgaagtctcaccctgtcactcagactggagtgcactggcacgatctcagctcactgcaacctccgcttcctaggttcaagcgattctcctgcctcagtcttcaaagtagctaggattataggcgccgcaaccatgctcagctaatttttgtatttttagtagagacaggatttcaccatgttggccagggtgatctcaaatcctgacctcaagtgatccgcctgcctcagcctcccaaagtgctgggattactggcatgagccaccgtgccaggccctgaaatgttatcttagttattaatttgcaattccttggctctagaggttgggcatcttctcagatctctagtggacatttggattttctttttggtgaactgtccagtttttctctctgctttacaatctttattatatgcaatcttcacatgtaggtactaccatttttttagtttgtttttgaaacagcatattgctctgttgcccaggctggagcacggtggcaaaaacatggcttactgcagcctttgacctccttggctcaagtactcctcctgtctcagcctcctgagtagctggtaccacaagcccataccaccatgcccagctaatttatttttgtagagatggggcctgaccatgttacttgggctcaaatgatcctctcccactcagcctcccaaagtgctaggattacaggcatgagccaccatacttggccccttttttttttttttttttttttttttttttttttttttgagacacagtcttgctctgtctcacaggctggtgtgcagtggcacgatctcagctcattgcaacctccacctcccagtttcaagtgatttttgtgcctcagcctccctagtagctgagattacaggcatgcaccaccatgcctggctgactttcatatctttagtgttgccatgttggctaggctggtctcaaactcctgacctcatgtgatccacctgcctcggactcccacagtgctgggattacaggtgttagccaccaccccgacattatttgaaacttttattttatcatgagagagttccaggagtcaactgaagagagatttttggtatgaaaattacatatgcaaaaagactgattccagtacatgaaattaaattcaacatttacattaaatgccttcaaatatggtaaaatggtttcttttggcagtttacctcattatgttttgaatgatttgtctatcatatgaaataacttttataaatatagtaactcaggcctgggcacagcggctcaagtgggaggactgcttaagcaaccgagtttgagaccagcgtggacaacatggggagaccccttctctcccaaaaaatagctgagcatggcagcgcactgttaaaggaaacagagtttctttggtgggtgattaaaatgttctggagttagatagtagtgatggttgcacaaccttgtgaatatattaaggtttccgctctatctaccattcaattgtactctctaaaacgattaattctatagtatatcaattatatctctaaataataaaaacaaaaagaaatggctgggtgcggtggctcatgcctgtaatcgcagcactttgggaggctgaggcgggcggatcacaaggtcaggagtttgagaccaacctgaccaacatggcaaaacccagtctctactaaaaatacaaaaattagctgggtgtggtggcacacgcctgtaatcccaggtactcgggaagctgagacaggagaatcacttgaacccgggaggcagaggttgcagtgagccactgcactccagtctgggtggcagagcgagactccgtctcaaaaagaaaaaaattaaaaaacaaaaagaaacctggttctatattttgtttaaatttatttttttaaccatcatgtaatatgtccaggtaatttgtttaaattttgacatcaaatgcaattgtgagaatttttatgattcagaaaaatctaagcaagctttataaaaacatacttttttttttacttttttttttttttctgagacacagcctcactctgtcgcccaggctggagggcaggttttcatgtttatctgtgagatgtacctttggcacattactttcctgacatgagatttaaatttttttttttatcttgtgacaatttaacttttttgacacataaaaattgtacatatttatttgtttgagatggagtcgcactctgtcactcaggctggagtgcagtggcgtgatcttggctcactgcaacctccgcctcccgagttcaagtgattctcctggctcagcctcccaagcagctgtcattacaggcctgcaccaccacacccggctgatttttgtatttttaggagaaacagggtttcaccatgttggccaggctggtcttgaagtcctgacctcaagtgatccacccaccttggcctcccaaagtgctgggattataggcatgagccaccgtaccagacccctaaaaattgtatatatttaaggtgtaccatttgatgtttagatatacattgtgaaatgattacattccacatattacctctacagagttaccatttttgtacacttggtcaacatcatcccattctccccttcctccacagatatttcttgtatactatatagaagccaagggtattttgggggaagagctcaaagttcctttcgtggagttaaaaatatatatatactatgtacatataagccatttagcaaccctagatgcttaataaagaatactggaggcccggtgtggtggctcacacctgtaatcccagcactttgggaggccgaggcggtcggattacgaggtcaggagttcaagaccagcctggccaacatggtgaaaccccatctttactaaaaatacaaaaattagccgggtgtggtggtgggcgcctgtaatcccagctactcggggggctgaggcagaattgcttgaacctgggaggcagaggttgcagtgagctgagatcacgccactgcattccagcctgggtgacagagcaatactctgtcgcaaaaaaaaaaaagaatactggaggctgggcgaggtggctcacacctgtaatcccagcattttgggatgccagaggcgggcggaatatcttgagctcaggagttcgagaccagcctacacaatatgctccaaacgccgcctctacaaaacatacagaaactagccgggtgtggtggcgtgcccctgtggtcctagctacttgggaggttgaggcgggaggatcgcttgagctcgggaggtcgaggctgcaatgagccgagatggtgccactgcactctgacgacagagcgagactccgtctcaaaacaaacaacaaataaggttgggggatcaaatatcttctagtgtttaaggatctgccttccttcctgcccccatgtttgtctttccttgtttgtctttatatagatcaagcaggttttaaattcctagtaggagcttacatttacttttccaagggggagggggaataaatatctacacacacacacacacacacacacacacacacacactggagttcgagacgaggcctaagcaacatgccgaaaccccgtctctactaaatacaaaaaatagctgagcttggtggcgcacgcctatagtcctagctactggggaggctgaggtgggaggatcgcttgagcccaagaagtcgaggctgcagtgagccgagatcgcgccgctgcactccagcctgagcgacagggcgaggctctgtctcaaaacaaacaaacaaaaaaaaaaggaaaggaaatataacacagtgaaatgaaaggattgagagaaatgaaaaatatacacgccacaaatgtgggagggcgataaccactcgtagaaagcgtgagaagttactacaagcggtcctcccggccaccgtactgttccgctcccagaagccccgggcggcggaagtcgtcactcttaagaagggacggggccccacgctgcgcacccgcgggtttgctatggcgatgagcagcggcggcagtggtggcggcgtcccggagcaggaggattccgtgctgttccggcgcggcacaggccaggtgaggtcgcagccagtgcagtctccctattagcgctctcagcacccttcttccggcccaactctccttccgcagcctcgggacagcatcaagtcgatccgctcactggagttgtggtccgcgtttttctacgtcttttcccactccgttccctgcgaaccacatccgcaagctccttcctcgagcagtttgggctccttgatagcgttgagtggaggccctgccgcgacttggcagtagcttattttgttcactcctctctggctggtgtgggggaggtgggggcattaggccagggtgaagcaggggaaccacttaggagtctgttaagatgatctgaacttcagaacaagatgttattaacagagtgaaagtatttggattctgggtatattttgaaatcggaggcaacaggtttttcagatagattcgataacggaggttatcctgaatagttgaaaagataaagttgccttttgctgaggtgggaaagagaagattgccagtagagcaggtttctcaggagttcagtcttgggcatagcatggtaggggtgaatttggctggagtgagttggagagtaggagaagagaaatccaaggcaacatttgaccagcctgggcaacatagtgtgactccgagtctgcaaaaattagacgggtgttgtggtgcgcgtctgtggtctcagctacctggaaggttcaggccttggaaggctcagggaggtggaggctgcagtgatctgtgattgcgcctctgcactccagcctgggcgacagagccagaccctgtcttaaaacaaaataaacggccgggcgcggtggctcaagcctgtaatcccagcactttgggaggccgaggcggccggatcacaaggtcaggagatcgagaccatcctggctaacacggtgaaaccccgtctctactacaaatacaaaaaattagccgggcgtggtgacgggcgcctgtagtcccagctactcgggaggctgaggcaggagaatgtcatgaagccgggaggcggagcttgcagtgagccgagatcgcgccactgcactccagcctgggcgatagagcaagactccgtctcaaataaataaataaataaataaataaataataaaaacatcggtaggcatatttcaaggaattctatttaaaaaaaatttttttagagacaagttcgctctctgtggcccaggctggagtacagtggcatgatcctagcccatggcagcgttgatctcttggcctcaagcgaccctcctttggagtcgctgggcctaaaggagtgagccaccacgaaattttattataaatggagggtagagaaattgggcaataaatggagggggaagtgagttaagaggaattttaattatgtgtgtgtggttttaaaagaggggggtcttgctctgttgcccaggctgctggggtgccagtggcgcaatcatgaatcactacagccttggactcctggcctcaagctatcctcccacctctgcctcccaaagtactgggattactagtgtgagccactgcactaagataggagcaacatgtttcagcatgtttgtgggttgataggaaagatgagaatgggaaagttgatgtcggaaagaagacaatggctagagcaatgtcctagagtaggtaagaagggatggatttggcctttgttggaaacattagcggttcttttggtgacagctatatagttaacacatctatgatacgtgaatgggcagataggatggcaggagattttgaaagttctcttgattcttactgttctcttagtgaaagaagcaaggttatcagctagaagctgggatgggagaggaaagagaagatgggaagtagatagttctttagaagagtgggcaagggttggactagggaagtttagtggaaatattgctaggcaacataaagagcctacttgagattcgtggtcatgagttgaaggagaccagacagcaagattgtgtatgagggcacccacagagtaaatggagagttgaaattaatgcagttgtgattttaccacgtggatatgaagaagtgagggggagaagtacaaaggagttctcttaatgattgaccatggaatttaagctggctaagaaaggaagtgagaggccgggcgcggtggctcacgcctgtaatcccagcactttgggagactgaggtgggtggattacctgaggtcaggagtttgagaccaacctggccgatatggcgaaaccccatctctaataaaaatacagaaaaattagccgggaatggtggcaggtgcctgtaatcccagctactcaagaggctgtggcaggagtatcccttggacccaggaggtggaggttgcagtgagccgagatcacgccactgtactccagcctggacgatatagtgagacttcacctcaaaaaaaaaaaaaaagaaaggaagtgaggattttaagaccctgagagacagtttaaaaagtgggaggatcggccgggcgctgtggctgacacctgtaatcccagcactttgggaggccgagttgggcagatcacaaggtcaggagttcgagaccagcctggccaatatggtgaaaccttgtctctactaaaaatacaaaaattagccgggcatggtgtcacgtgtctataatcccagctactcgggaggctgaggcagaaaaattgcttgaacctgggaggcagaggttgcagacagctgagatcactccattgcactccagcctgggcaacaagagcaaaactttgtctttaaaaaaaaaaaaaaaaaaagaatacaaaaattagccgggcgtggtggcgcgtgcctataatcccagctacttgggaggctgaggcaggagaatcagttgaacacgggaggcgaggtttgcagtgagccgagattgcgccactgcactccagcctgggcgacagagcaggactcctcttggaaaaaaaaaattagctgggcatggtggcaggtgcctgtagtctcagctactagggaggctgaggcaggaaaatcacttgaacccgggatgtggagtttgcagtgacccgagatcgtgccactgtactccatcctgggcgacaaaatgagactctgcctcaaaaaaaaaaaaaaaaaaaagtgggaggatcaatgtactgccagtcctaatgaagtggaatgattgtccccatcaaatcactagtaggagtaagttgcagagcctagaaggtgatggttaagagagtgggattcttgaaactgcatttatggagaggttgtggttattggttataataaataaatacagttgaagtgagtgagtagctgagatttggggatgtatcagttcattcttacactgctacaaagacatacctgagaccaggtatttataaagataagaggtttaatcagctcacagttctgctgcctgtacaggcttctcttgtggaggcctaaggaaacttacagtcatggtggaaggtgaaggggaaacaagcacagtcttcacatggccagcaggagagagagagaagggggaagtgctacatactttaaaacaaccagatcttgtgagaacgcttatcaggaaacagcacttggggatggtgctaaatcattagaaatcacccccatgatccagtcgcctcctaccatgcccacctccaacactggggatcacaattcagcatgagatttgggtaggaacacagagctgcaccacatcagaggatgtacaagattgtggtggagaggagtttagagacctgcaaatatagggtaattgaagggatcatctacatggatatttaaatcaccaaaaattatgacaggagtagtgttggagagagaactgcgatgtaaacattaaggaatgaggaagagtgactcggtaggctgtaggtgactgcaataggaaacgataatagactgtgagtctggtgacaagattttccttctttctttttttccccccccccgagacagggcctctttttgttgcccaggtgggagtgcagtggcgcgatcacggctcactacaacctcctcccaagctcaagggattctcccacttcagcctctcaagtagctggaactacaggtgctgaccaccatgcctggctactttttgtcaggattttcaaggctgggaattttgagaggggaatggaggagaataatctgaaagtgcaagtaaggagcagggaagatttcttttttcttttttttttttttttttgagtcggagtctggctcagtcgcccaggctggagtgcagtggcgagatctccgctcactgcaagctccgcctcccgtgttcacgccattctcctccttcagcctcccgagtagctgggactacaggcgcccgccaccacgcccagctaattgtttttttgtatttttagtagagacggggtttcaccgtgttagccaggatggtctcaatctcctgactttgtgatccgcccaccccggcctcccaaagcgcttgggattacaggcgtgagccaccgcgccagccagagcagggaagatttcttccccacatctccagtaggtacagtgatatgaagtgtgtggaggagaaaagaggaaacatctatcatttgagatggctgcgaaaggaaaaggcatcctcagggagctagattttacttagagcaagaaatgaagggatgattcagaggttaaaagagtggattttatgaattactcaagggagcacagtggaagtttcaggaagtggtaggagaaggtagaagatggcagggtgttgggaataatttgagaaatctgagctactggaaatgactgagaatcagatataaaggcagtcctggtggtccgttctggctgccgttgctgtgtaacgaatctgccaaaacttagtggcttgaaacaacaaagaacattttattatctctcattgtttctgtgggttaggaatttgtgagagccgtgctgggcagttttcgtgcggctgtctcgtggttgcacctacatagttgctagagctacagtagctggggactgagcagctagggattggcaggctatctctttttttcatgtagtctcatgaagatttctttatgtggtttcaatgtgtgggctggtttggatttccttatagcatggtggcctcagttggattgctgttttgtgatccttttcatccctccttgtcctgtccccagacaaccactgatctactttctgtcaccatagattagcctgcatttttaagaatttttataaacgtggaatgatagagtaccttttttgtcacgtttcttttatttatcatagctattttgattttcatccattttattgctgagtagtatcccattgcatgtatatactatactgtattcattcgcttgcttgtgaacatttgggctttttccagtttgggactgttaacaagtagagccactatgaatattagtgtataagacttcatatagccaaggctggcagatcgcttgagcccaggagtttgagaccagcctgggaaacatggtgaaacctctatttttattttaaaatcaaaaattaaaaattttctataaaaaattttaaagaagactttgtatagacatacgctttcatttttcttgagtgaatacttaggtctcagggtagatgtattttaagtctttaaggagctgtcaaactcttcctcaaagtggtggttgtaccatgttactttttaatataacagagattaattgagcaaagaaaaattcaaaagttggacagcccccacaactaaataggttcagaacagctcccccattttgcattttgaccagcaatgtatgaaagttccatttgctcagtgtccctgcaaacacctggtatggtcagtctttttaattttaggcattataatagatatagtggcttcttgtgattttaattagcatttcctaatgaccagtgctgctgttgatcatttcatgagtgtatttgccatccgtatatcttttttggtgaagtgtctattcaaatcatttgggttttttttttttttgttttttttttttggagacagtgtctcactctgtcacccaggctgttgtgcagtggtgcaatcacacagcctactgcagcctccacctcctgcgctcagtcttcttgtctcagccttctgagtagctgaaattacgagcacacgccacaatgcctggctaattttttaaaattttgtagaaacaaggtctcattatgttgcctgggcttgtcgtgaactcctgggctcaagcaatcttcctgcctcagcctcccaaagattgggattgcaagtatgagccactgcacccggccaacttacccatcttttaattgaatttttttgttgttgaggtttgagagttcttcatgtttgctgggtacaatatctttatcagataggtaacttgcatgtattttctcccggtttacactttggtttttcattttgttaacaacgtctttttaagaacagaaaatcttaattttgctgaaatctaatttttcagttttttctttgatggttttgagagaggaggtaaaaaaagactaggtaagccgatagttagacagagtcctcggtagaacttcccttctaacaaaaagcagcccaagaaatcacttctcttctaacaaggagcagcctggaagatcgggctgtaaacatgtataaggaagcagctctggcacagagggggagcttcctgggtaatcagcaagcttcacatacgtaaggtgggtatgtgaagtaaacacagtatgtgaagtaaacacagtggaccttagtacatactcagataaggaagctggaagcttgcatgttgtgagttgttggggttgcctgcagctgcacggagagaaaggggtacctggggccaggcatgtccaccatggtggctccacctccccttatttagcacatgcacaataggaaagagataagcaatgtggagtagctcaggccaaggacctgcctgcataataaaaggttggggtgggggatgccagagattcacgctctgtgcagatggcaacacctggtcctaactggttttttgctccctatgtgtagataagctacccccttcccattagctcatttataaaaatgcttgcatttcactgtggaatgggaactcttttcaggacctctctctgcaggagagagctagtctctttcttttgcctattaaacttctgctctagcctcacacccttggtgtgtcagcgtccttgatttcctcagcgtgagaccaagaacctcgggtgccaccccaggcaacaaggccatttcagtttgttcttttgttataggcaatccatgatcacagatttttctctcttttttttttttacacagtttagagttttagttttacacttaggtctgtaatccattttgtattaattcttatatgtggctcagtgtaggtggaaatttggtttgtttttgcataaggatttccaatagttttaccaccatttcttgaaactactatgctttctctattaaaccacatttgtaactttagttaaaatcagtcacatatatcacagggctatttctgactctcaattctgttacattgtctattagtgtatattgatgtcagtactacacttttaattactattgcttcagggtatgtcttgtaaaccaaaaataaaattataggccccccccgcccctgcacaaccaactgaatggacccatcctctcagccaagggcattccaaaattaacctgaaaaactagttcaagccatgatgggaagggggagttggacatgtctcatcacaccctactaccttttggaattactgatagaacagactcttaaagtctgaaaagaaacatttacaacctaccctctctgaagcctgctacctgggagcttcatctgcatgataaaaccttggtctccacaaccccttatggtaacccaaacattcctttctgttgataataactctttcaactagttgccaattagaaaatctttaaatcttcctatgacctagaaacctccctacccccactttgagttgtcctgcctttcctgacagaactcatgtacatcttacatatattgattgatgcctcatgtctccctaaaatgtataaaacaaagctgtaccccaccaccttggggacatgtcatcaggacctcctgtggctgtgtcataggagcgtctttaactttggcaaaataaactttctaaattgattgaaacctgtcttagctacttctggtttacagtcttaaagttagataatgtaaattgtccagctttggtttatttttgtccttagtagttccatataaattttagaatcagcttttcaatttaatacactactttcctcttagatccacaattaaatatatttgatgctaacaattctgttttatgtttttcgttttttttttttgagacaagagtttcgctcttgttgcccaggctggagtgcagtggcgcgatcttggctcaccacaacctccacctcccaggttcaagcaattcttctgcctcagcctcccgagtagctgggattacaggcatgcgccaccacgcccggctaattttgtatttttagtagagacggggtttcaccatgttgatcaggctggtcttgaactcctgacctcaggtgatccacccacctcggcctcccaaagtgttgggattacaggcgtgaaccaccatgcctggccagttctgttatttttaaaacccaagtttccctggtcatatcttggttggatgaagcgtattttcaatagattaccctggaaaggctagtgagtacggtattcttctacattttagacttttcttagtcttgctacttcaaggacagctaggctgcatataaaattcttggctcatactttttccccataaatttctatgagaaagtctaatgataactgattttctttattttgtaacttagtctttttgcttagaggctctctgaggatgggagggggttcttcctcccatccctaggaatttttcttttttttaaattcctaatcactagaccaccaggaagattgtttgttttgttttgtttttattcttcagggaccccatttatacatacgttaaataaatactgtttgccaatgtatcaaccattttgcttcttatttatttttgttcctttggttctttttcatggctttgctttggtgctccttagattttcagtcagatgtatttgtccttgggtaccttgtaatcagtattaccttttcttctgtcgctttgttttctgttcgttttgaaattacttgtttcctggtctggcaataacagttgagatatgaggagtttgagctgccatctgtctatgtatcttgctttaagactgcactcttctattgatatcactggccttgattttgtgatttctttatttcttcaggaccacccttcattttctactgtttgcttcctttttttttgagatggagtctcactctgtcactcaggctggagtgcagtgatcttggctcattgcaacctctgcctcccgggttccagcaattctcctgcctcagcctcccaagtatctgggactacaggtgtgcaccaccatgcccggctaagttttgtatttttaatagagacggggttttgccacattggcaggctggtctcaaactcctgatgtcaagtgatccacccaccccacccacctctgcatcccaaagtgctgggattacaggaatgagctgccgtgcccagcctcccccctacccccctttttttctttcgagacagagattataggtgtgagccactggacccagcctgtttttattccttttaccaaatctccaaggaatatcttcccttccaagtgcgaatgtaaccttaagtcagttaacctctttgtgattacttttcttatctgcaaagtgacttaatgatcttaagtactttttttttttgagacagggtctcactgtcaccctggctggagtgcagtggcacgatctctgatctccactcactgcaatctcctcttccctggttcaagcggccctcccaccttagccttctgggtagctgggactacagatgtgaaccaccacgcccagctaatttttgtactttttgtagagatggggttttgccatgttgcccaggctgggattattaagtactttttatcatacagcaagattgacattttatattggaatacatttgtctctatataacggagattaacaggaaaatgacaagcctgggtgcggtggctcatgcctgtaatcccagcactttgggaggctgaggtgggaggatcacttgaggtcaggagttcgagaccagttttgccaagatgatgaaagcccatgtctactaaaaatacaaaaattagcccagcttgatggtgggcgcctataatcccagctatttgagagactgaggcaggagaatcacttgaacctgggcagcagaggttgcagtgagccgagatcatgccactgcactccagcctgggtggcatagcgagactcttgtctcaagagaaaacaaaacaaaacaaaaaaaaaacaggaaaatgacaaaaagtaatattacaactcagtgaattttataacaaacttttttggaattcattgactaatactataccaaatccaaaatactctctagtataccaaatccaactctaccctatagtataaattggattctatttggacttgtctcactaatccctcatacagtgtgttttattttttattgaagtaaaaaaatttgtcattttaaccatttttaagtatatagttcagtaatattaagtatgttcatgttgttgcgcaatagatcttcggaagtttttcgtcttgcaacctgaaactctacccattagcaaattcccatttctccttacacttagcccttggtaatcatcattcttttttttttttttttgagatggagttttactcttgttgcccaggctggagtgcaatggtgcaatctcgactcaccacaacctccgcctcccaggttcaagcaattctacctcagcctcccgagtagctgggattacagtcatgcaccaccacgcccggctaattttgtatttttagtagagaaggggtttctccatgttgaggctggtctcgaactcctgacctcaggtgatctgcccacctcggcctcccaaagtgctgggattacaggcgtgagccactgcgcctggcccattctttctaattctataaatttgactacttagttaccttacataaataaattcttatagttagtgttatttttgcttccatgccttttttgttgttgttcatgctcttacttggaatgcgttctattttgtctacctatgcacatcctgttgggttttttttttttttgggggttttttttgtttttttttgtttttttttcccagacaaggtctcaatttgttacccaggctggagtgcagcggcgccatctccactcactgcatcctcaacttcctgggcccaggtgatcctctcgcctcagcccctgcaggtagctgggactataggcatgtgccaccatgcccagctaaatttggtttttttgtttgtttgtttttgagacagagtctcactctgtcacccaggctggagtgcagtggcacaatctcagctcactgcaatctctgccgcccgggttcaagtgattctcctgcctcagcctcccaagcagctgggattacaggtgactgccaccacgccagctaagttttgtagttttagtagagatggggtttcaccttgttggccatgctggtctcgaactcctgacctcgtgatctgcctgcttctgcctcccaaagtgctggaattacaggcatgagccaccacgcccggccagaatttttgtatttttagtagacacaaggttcttaccctgttgcctaggctggtctggaagtcctggactcaagcaattcacctgccttggcctcccaaaatgctgggattacaagccaccatgcccggcctaaatcctgttgttttgttttgttttattttgttttgttttgttttgtttgttttttgagacagagtctcgctatgtctctcaggctgtagtgcagtggcgcgatcttggctcactgccacctctgcctcccaggttcaagtgattctcctgcctcagcctcccaagtagctgggattacaggcatgtgctactatgtccggctaatttttgtatttttagtagagacagggtttcaccatgttggccaggctggtctcgaactcctgacctcgtgatccacccacctcggccacccaaagtgctgggattacaggcgtgagtggtttttatttcttaggccggtttcctccatatgatcttgcagtagacattaatttctttcctttttaattaaaatactgtttgtatttcacattttgatgtttgttaagatttgttttatattgttttttgttttgtcttgtgtgatagtcttaaatccctagttagataataactggagagtaccatgtttctatatatctctcagtgacttgcacagtgctagcagatagtgctaaaaaattatttattattattattattttgttattgttgttgttgttgttagacagggtcttcctctgtcacccaggctagagggcaatgggatgatcatagcttactgcagcctccaacaactgggctcatgtaattctcctgcctcagcttcccaagtagctgggattacaggcatgagccaccatgtctggacaaaaatatttccaggtgcagtggctcatgcctgtaattcccacacttgggaggccgagcgaggctggaggatcacttgagcctaggagttcaagaccagcttggctaagatggcgagaccccgtccctacaaaaaattttaaaaactagccaggcatggtggcatgcacctatattcccaactactcagtgggctgaggtgggagggtcatttgaacacaggaatttgaggggagaaaaaaagaagagagaaagagaagtgaaggaaggaagaaaggaaggagggagggagagaagaaagaaacgaaagaaaggaaaagaaaaggaaggaaagaaaattggtaccaggaaagcaggaaagggaaatggaagtaaaaaaataataataataataaaatgaaaattggttagtcactattaacaatttgtatccttataatctggaaacattataatttcaaaagaaaaaatattctttggatcataggttctgaggtcagaacagcattcccgtagtctagatgaagtcaagttttatctgatcttaattgaaataaatatagctggccttgaacaaatctactcatggtatgtggataggaattaaattgtaggggcattcacttgatggcattcattcttagaacatttacctatgtctagcttttggagtaaagtcacataacctctaaccaggtaagtttcctgtggctttatttaggattttaaatactcattttcagtgtaattttgttatgtgtggattaagatgactcttggtactaacatacattttctgattaaacctatctgaacatgagttgtttttatttcttaccctttccagagcgatgattctgacatttgggatgatacagcactgataaaagcatatgataaagctgtggcttcatttaaggtatgaaatgcttgcttagtcgttttcttattttctcgttattcatttggaaaggaattgataacatacgataaagtgttaaagtacatgttattcagttttcattttgaagattagatggtagtatgagttagttaaatcaggtgatatcctcctttagaagttgatagcctatatatgtcatcctttgtggaggcaatttaaataaaatttaaaacatttattcctggctgggtatggtggctcactcctgtaatcccagcactttgagaggctgaggcgggtggatcacctgaggtcaggagtttgagaccagcctggccaacatggtgaaaccccgtctttactaaaaatacaaaaattagccaagcatggtggcacgtgcctgtaatcccagctgcttgggacactgaggcaggagaattgcttgaacctggggggcagaggttgcaatgattgcaccactgcactccagcctgggcgatagagtgagactccatctcagaaaacgaacaaacaatgtattccttttagtatttttacattgtatcaaactatggaagtcctctaattgagattaataagaaaaagacaatctgaattataattttaaacatttaacaagcatgtagtaaaataatgatgaagataaatagcattagtacagcaattaatatttgtagcatgctgacagtgctctgtgtgcgtttcatatattaaattactctaatcatcccaaatcctgtaagttgggtatcaattcaagtgttcctattgggtaggaatatacagttcttttaggaaatgtagtatggttctgtgtctcaaacaggacacttacacagttggccaacatcatcaccttctccattctctgagatgtttagtcttactgagcactaaatatgggtcatcaatagtccagactaccttgagcaaacaatagtccagactaccttgagcaaacagagcatatactcatacagtgtataaagagcaccaagcatacagatttcatgtctttctcatagttactcttgtaacatgagctaaagatcagacctctatgtcacctttgtaactgatttctagatttttttttttttttgagatggggtcttgccctgtcacccaggctggagtgtagtggcgtgatcatgcctcattggagccttcaactcatgagctcaaacaatcctcctacctcagcttcctgagtagttgggaccacaggtgtgtgccaccacacccagctcatttttgtattctttgtagagatgcagtctcaccctgttgcccacgctggcctggaactcctgagctcaaaagatccctccgccttgaccttccaaagtgctgggattacaagcatgaaccactgcacccggcctagatttttaaatgtgctttccagtatacactgaaactagaagtcgactaaagaattaccaagagaattctataaaatagagattgaaatggggctcgatgtgggatgggttggtgatattgcagggagaagtaatctgagtaaaggaggaaaagaactgatttgggaaaacgatagttttagtagtgagtttgagtatgaattaagttgagattgaatttgaattaagttgaggttgaatatgaattaagttgaggttgagtttgaggtatgaattaagatgtgaaattgatcattggaaatgttagattgagaaaagtcacagctggattaatagcttcagaagtgtgtttgcagacagttgcaactaaagtaataagaatagatggccttggccgggcgcggtggctcacgcctgtaatcccagtactttgggaggctgaggcgagcaaatcacgaggtcaggagttcaagaccagcctggcccacatggtgaaaccccgtctttattaaaaatacaaaaattagctgtgcacagtggtgcacgcctgtaatcccagctactcgggaggctgagacaggagaatcgcttgaacctgggaggtggaggttgcagtgagctgagatcagtgtgactgcactccagcccggtgacagagtgagactctgtgtaaaaaaataaaataaataaaataatggccgtaagcaagtaaagaaggatggccagctcttattgggaatgcctaaatctaaggcttgatcagaagtaatgaaaccgttggggccctacattgctatgacatccaaagggccatgaatatcaggaagaaagataattaacagggtctaatgttacagagaggttgagagcaaggagatttgattaaaagggtctttagagctgatgtcaggtgtatgatgcctttaagagcagtttttatagtgcagggggtggtcaaaagagaaaataggtgctttctgaggtgacggagccttgagactagcttatagtagtaactgggttatgtcgtgacttttattctgtgcaccaccctgtaacatgtacatttttattcctattttcgtagcatgctctaaagaatggtgacatttgtgaaacttcgggtaaaccaaaaaccacacctaaaagaaaacctgctaagaagaataaaagccaaaagaagaatactgcagcttccttacaacaggttattttaaaatgttgagatttaacttcaaaggatgtctcattagtccttatttaatagtgtaaaatgtctttaacttaagtgattagtacagtgtttctattgacatatacttatacaacttcaaaaacaactattaaattttctgttatttaggaacatgcatattagtcatgaaagtataaagaattagatgggaatgataaatgctaaaatcaggacatgtgttccatttgtgaatggaaggcagggagaaggtgccgtttggaaggagtacccaagagccgtaagctgaattggcagtgttttacatcttaagctgagagatagatttttttttcccctttttctttaaaaactctaaaactgttaattccaaggaacccagaagtctaggtagattatttctgctagttaaaagcagtagtcctgaaagctgaatattttggtgtcttttgagccaactttagtttcatcattaccaagggggaagagagctaacagttgatgagcacttgctctaggccagtccagagtgctgggcaccatacgcattttatctccctcccgctattcacaacaaatatgggaggtagtttatattatagccatctaataagatggggaaactaagactcaaagagattcagaaacttgtccatgattataaatgtaagagagttggaattcagatttatgtatttagaccccaagcctttctcattacatcattttgccttccaaatctctaccctctatccttcacctccccactgatcaaaacgagatgatagtttgccctcttcaaaagaaatgtgtgcatgtatatatctttgatttcttttgtagtggaaagttggggacaaatgttctgccatttggtcagaagacggttgcatttacccagctaccattgcttcaattgattttaagagagaaacctgtgttgtggtttacactggatatggaaatagagaggagcaaaatctgtccgatctactttccccaatctgtgaagtagctaataatatagaacaaaatgctcaagaggtaaggatacaaaaaaaaaaaaattcaatttctggaagcagagactagatgagaaactgttaaacagtatacacagttgtcagtttgatccaccgaggcattaattttttcttaatcacacccttataacaaaaacctgcatattttttctttttaaagaatgaaaatgaaagccaagtttcaacagatgaaagtgagaactccaggtctcctggaaataaatcagataacatcaagcccaaatctgctccatggaactcttttctccctccaccaccccccatgccagggccaagactgggaccaggaaaggtaaaccttctatgaaagttttccagaaaatagttaatgtcgggacatttaacctctctgttaactaatttgtagctctcccatgaaacttttgtagcttaaatacacaagaattttttgaaaaggaaataagataatgatgcaaaatagttaattttttaaaaaaatgttagacactgcagtggatgcaacaaaatactttatatgaaagatttatccagttaacttttgtggagtattaggtattagactaataattagcacacttacttaagttagaaagtataataatgcgccggacgcggtagctcacgcctgtaatcccagcactttgggaggccaaggtgggcggatcacaaggtcaggagatcgagaccatcctggctaacacggtgaaaccccatctctactgaaaatacaaaaaaatttgccgggcgtgatggcgggcacctgtagtcccagctactcgggaggctgaggcaggaggatggtgtgaaccccggaggcagagcttgcagtgagtcaagatcgtgccactgcactccaacctgggcgacagaatgagactccatctcaaacaaaaaaacaaaacaaaacaaaaaaaagtgtaataataatttatcattagctggatgatatgctgttgtttcccatgtcacctgtataagatatgtaaaataagaacacattatttacatctaatatagataaaatcctgaggcgctctcagattgttttgtagagttcaaatgtaaatattgttttcatttatggtccttttggttataagtaacagaaatcaactctaaaaagatttttattataggttagattatgtcatggaaccttaaggcttgtccctttctagttcttttgtgtaaagcggtgatttcttccatggagggaatggtatttaggcaatttttttttttttttcgagatggagtcttgctctgtcgctcaggctggagtgcagtggcaccatttcagctcactgcaacttccacctcctgggttcaagtgattctcctgcttcagcctcccaagtagctgagattacaggcacccgccaccacacccggcttattttgtatttttagtagagatggggtttcaccatgttggccaggctggtcttgaactcctgacctcaagtgatctccccaccttggccttccaaagtgctaggattacaggcgcctagcctaggcagtcattttcaaaaaacaagcatgactcaccaaaagttttaagattttctgtgataatgttcttattgaggcttacattatattacagtttcttgaatctaaaatgatgtaccctcttagaatatatacatcatgcttcattggtctcagggggctgatttttataaggagagatttgctagttttcacaatatgtcctctaagttggcatgtatagctaaacaggctttcataaaaatatacaatttagttaatgaaatttgggatatagtcttttatgattgaaataattttgctaaatagactgtctctgatttattaggtaatcaccactcttattttgttttacttccttaatgtctacatagaaaggaaatgagaaaaatccagaggttgtcatttgacttatgagtctgtttgacttcaggatttggtacatgaaatttcacttaatctttttgatatgtataaaacaaatattctgggtaattatttttatccttttggttttgagtcctttttattcctatcatattgaaattggtaagttaattttcctttgaaatattccttatagccaggtctaaaattcaatggcccaccaccgccaccgccaccaccaccaccccacttactatcatgctggctgcctccatttccttctggaccaccagtaagtaaaaaagagtataggttagattttgctttcacatacaatttgataattagcagaatagaggattgtaaaatgtcattgtagaacatcccttgggccagattctaatgggtagaaatttgaactaaacctctgggttttgtttgtttttaatgcctttctgttacccagatgcagtgctcttgtagtcccaagtctaagctctaggttgccttctttcctggcagaagttggtgtctatgccataaggaggtagttcctgttagaagggatttaattataccttatataaggaattagtgtttgcccttctaggtatagttggatgttagcttctgatgtaaactggatttctttttctttctctctctttttttttttttgttttggaggcagagttttgcccttgtaccccaggctggagtgcagtggtgtgatctcagctcacagcaacctccgcctcctgggttcaagcaattctgcctcggcctcccaagtagctgggattacaggcgactgccaccacacccggctaatttttgttttattagtagagatggggtttcaccatgttggccagactgatcttgaactcctgacctcaggtgatccacccgccttggcctcccaaagcgctgggattacaggcgtgagctgccgcacccagctgtaaactggatttctaatggtagatttttaggtattaacaatagataaaaagatactttttggcatactgtgtattgggatggggttagaacaggtgttctacccaagacatttacttaaaatcgccctcgaaatgctatgtgagctgtgtgtgtgtgtgtgtgtgtgtgtgtattaaggaaaagcatgaaagtatttatgcttgattttttttttttactcatagcttcatagtggaacagatacatagtctaaatcaaaatgtttaaactttttatgtcacttgctgtcttttcgtcctcgttaaatttaattttgttggtcttttgttgttattggttggttttctccaaatgctagctatgttaagaaatttaaggccaggtacagtggctcatgcctgtaatcccggcattttagaaggctgaggcaggaggatcacttgagctcaggagtttgagaccagtctgggcaacatagcaagacctcgtctttgtttaggggaaaaaaaagaaatttaagtaggagattatataagcaaaaatacaattaatttccagcattcactatataatataaatctccagactttacttttttgtttactggatataaacaatatctttttctgtctccagataattcccccaccacctcccatatgtccagattctcttgatgatgctgatgctttgggaagtatgttaatttcatggtacatgagtggctatcatactggctattatatggtaagtaatcactcagcatcttttcctgacaatttttttgtagttatgtgactttgttttgtaaatttataaaatactacttgcttctctctttatattactaaaaaataaaaataaaaaaatacaactgtctgaggcttaaattactcttgcattgtccctaagtataattttagttaattttaaaaagctttcatgctattgttagattattttgattatacacttttgaattgaaattatactttttctaaataatgttttaatctctgatttgaaattgattgtagggaatggaaaagatgggataatttttcataaatgaaaaatgaaattcttttttttttttttttttttttgagacggagtcttgctctgttgcccaggctggagtgcaatggcgtgatcttggctcacagcaagctctgcctcctggattcacgccattctcctgcctcagcctcagaggtagctgggactacaggtgcctgccaccacgcctgtctaattttttgtatttttttgtaaagacagggtttcactgtgttagccaggatggtctcaatctcctgaccccgtgatccacccgcctcggccttccaagagaaatgaaatttttttaatgcacaaagatctggggtaatgtgtaccacattgaaccttggggagtatggcttcaaacttgtcactttatacgttagtctcctacggacatgttctattgtattttagtcagaacatttaaaattattttattttattttattttttttttttttttgagacggagtctcgctctgtcacccaggctggagtacagtggcgcagtctcggctcactgcaagctccgcctcccgggttcacgccattctcctgcctcagcctctccgagtagctgggactacaggcgcccgccaccacgcccggctaatttttttttatttttagtagagacggggtttcaccgtggtctcgatctcctgacctcgtgatccacccgcctcggcctcccaaagtgctgggattacaagcgtgagccaccgcgcccggcctaaaattatttttaaaagtaagctcttgtgccctgctaaaattatgatgtgatattgtaggcacttgtatttttagtaaattaatatagaagaaacaactgacttaaaggtgtatgtttttaaatgtatcatctgtgtgtgcccccattaatattcttatttaaaagttaaggccagacatggtggcttacaactgtaatcccaacagtttgtgaggccgaggcaggcagatcacttgaggtcaggagtttgagaccagcctggccaacatgatgaaaccttgtctctactaaaaataccaaaaaaaatttagccaggcatggtggcacatgcctgtaatccgagctacttgggaggctgtggcaggaaaattgctttaatctgggaggcagaggttgcagtgagttgagattgtgccactgcactccacccttggtgacagagtgagattccatctcaaaaaaagaaaaaggcctggcacggtggctcacacctataatcccagtactttgggaggtagaggcaggtggatcacttgaggttaggagttcaggaccagcctggccaacatggtgactactccatttctactaaatacacaaaacttagcccagtggcgggcagttgtaatcccagctacttgagaggttgaggcaggagaatcacttgaacctgggaggcagaggttgcagtgagccgagatcacaccgctgcactctagcctggccaacagagtgagaatttgcggagggaaaaaaaagtcacgcttcagttgttgtagtataaccttggtatattgtatgtatcatgaattcctcattttaatgaccaaaaagtaataaatcaacagcttgtaatttgttttgagatcagttatctgactgtaacactgtaggcttttgtgttttttaaattatgaaatatttgaaaaaaatacataatgtatatataaagtattggtataatttatgttctaaataactttcttgagaaataattcacatggtgtgcagtttacctttgaaagtatacaagttggctgggcacaatggctcacgcctgtaatcccagcactttgggaggccagggcaggtggatcacgaggtcaggagatcgagaccatcctggctaacatggtgaaaccccgtctctactaaaagtacaaaaacaaattagccgggcatgttggcgggcaccttttgtcccagctgctcgggaggctgaggcaggagagtggcgtgaacccaggaggtggagcttgcagtgagccgagattgtgccagtgcactccagcctgggcgacagagcgagactctgtctcaaaaaataaaataaaaaagaaagtatacaagtcagtggttttggttttcagttatgcaaccatcactacaatttaagaacattttcatcaccccaaaaagaaaccctgttaccttcattttccccagccctaggcagtcagtacactttctgtctctatgaatttgtctattttagatattatatataaacggaattatacgatatgtggtcttttgtgtctggcttctttcacttagcatgctattttcaagattcatccatgctgtagaatgcaccagtactgcattccttcttattgctgaatattctgttgtttggttatatcacattttatccattcatcagttcatggacatttaggttgtttttatttttgggctataatgaataatgttgctatgaacattcgtttgtgttctttttgtttttttggttttttgggttttttttgttttgtttttgtttttgagacagtcttgctctgtctcctaagctggagtgcagtggcatgatcttggcttactgcaagctctgcctcccgggttcacaccattctcctgcctcagcccgacaagtagctgggactacaggcgtgtgccaccatgcacggctaattttttgtatttttagtagagatggggtttcaccgtgttagccaggatggtctcgatctcctgacctcgtgatctgcctgcctaggcctcccaaagtgctgggattacaggcgtgagccactgcacctggccttaagtgtttttaatacgtcattgccttaagctaacaattcttaacctttgttctactgaagccacgtggttgagataggctctgagtctagcttttaacctctatctttttgtcttagaaatctaagcagaatgcaaatgactaagaataatgttgttgaaataacataaaataggttataactttgatactcattagtaacaaatctttcaatacatcttacggtctgttaggtgtagattagtaatgaagtgggaagccactgcaagctagtatacatgtagggaaagatagaaagcattgaagccagaagagagacagaggacatttgggctagatctgacaagaaaaacaaatgttttagtattaatttttgactttaaattttttttttatttagtgaatactggtgtttaatggtctcattttaataagtatgacacaggtagtttaaggtcatatattttatttgatgaaaataaggtataggccgggcacggtggctcacacctgtaatcccagcactttgggaggccgaggcaggcggatcacctgaggtcgggagttagagactagcctcaacatggagaaaccccgtctctactaaaaaaaatacaaaattaggcgggcgtggtggtgcatgcctgtaatcccagctactcaggaggctgaggcaggagaattgcttgaacctgggaggtggaggttgcggtgagccgagatcacctcattgcactccagcctgggcaacaagagcaaaactccatctcaaaaaaaaaaaaataaggtataagcgggctcaggaacatcattggacatactgaaagaagaaaaatcagctgggcgcagtggctcacgccggtaatcccaacactttgggaggccaaggcaggcgaatcacctgaagtcgggagttccagatcagcctgaccaacatggagaaaccctgtctctactaaaaatacaaaactagccgggcatggtggcgcatgcctgtaatcccagctacttgggaggctgaggcaggagaattgcttgaaccgagaaggcggaggttgcggtgagccaagattgcaccattgcactccagcctgggcaacaagagcgaaactccgtctcaaaaaaaaaaggaagaaaaatatttttttaaattaattagtttatttattttttaagatggagttttgccctgtcacccaggctggggtgcaatggtgcaatctcggctcactgcaacctccgcctcctgggttcaagtgattctcctgcctcagcttcccgagtagctgtgattacagccatatgccaccacgcccagccagttttgtgttttgttttgttttttgttttttttttttgagagggtgtcttgctctgtcccccaagctggagtgcagcggcgcgatcttggctcactgcaagctctgcctcccaggttcacaccattctcttgcctcagcctcccgagtagctgggactacaggtgcccgccaccacacccggctaatttttttgtgtttttagtagagatggggtttcactgtgttagccaggatggtctcgatctcctgaccttttgatccacccgcctcagcctccccaagtgctgggattataggcgtgagccactgtgcccggcctagtcttgtatttttagtagagtcgggatttctccatgttggtcaggctgttctccaaatccgacctcaggtgatccgcccgccttggcctccaaaagtgcaaggcaaggcattacaggcatgagccactgtgaccggcaatgtttttaaattttttacatttaaattttattttttagagaccaggtctcactctattgctcaggctggagtgcaagggcacattcacagctcactgcagccttgacctccagggctcaagcagtcctctcacctcagtttcccgagtagctgggactacagtgataatgccactgcacctggctaatttttatttttatttatttatttttttttgagacagagtcttgctctgtcacccaggctggagtgcagtggtgtaaatctcagctcactgcagcctccgcctcctgggttcaagtgattctcctgcctcaacctcccaagtagctgggattagaggtccccaccaccatgcctggctaattttttgtactttcagtagaaacggggttttgccatgttggccaggctgttctcgaactcctgagctcaggtgatccaactgtctcggcctcccaaagtgctgggattacaggcgtgagccactgtgcctagcctgagccaccacgccggcctaatttttaaattttttgtagagacagggtctcattatgttgcccagggtggtgtcaagctccaggtctcaagtgatccccctacctccgcctcccaaagttgtgggattgtaggcatgagccactgcaagaaaaccttaactgcagcctaataattgttttctttgggataacttttaaagtacattaaaagactatcaacttaatttctgatcatattttgttgaataaaataagtaaaatgtcttgtgaaacaaaatgctttttaacatccatataaagctatctatatatagctatctatatctatatagctattttttttaacttcctttattttccttacagggttttagacaaaatcaaaaagaaggaaggtgctcacattccttaaattaaggagtaagtctgccagcattatgaaagtgaatcttacttttgtaaaactttatggtttgtggaaaacaaatgtttttgaacatttaaaaagttcagatgttagaaagttgaaaggttaatgtaaaacaatcaatattaaagaattttgatgccaaaactattagataaaaggttaatctacatccctactagaattctcatacttaactggttggttgtgtggaagaaacatactttcacaataaagagctttaggatatgatgccattttatatcactagtaggcagaccagcagacttttttttattgtgatatgggataacctaggcatactgcactgtacactctgacatatgaagtgctctagtcaagtttaactggtgtccacagaggacatggtttaactggaattcgtcaagcctctggttctaatttctcatttgcaggaaatgctggcatagagcagcactaaatgacaccactaaagaaacgatcagacagatctggaatgtgaagcgttatagaagataactggcctcatttcttcaaaatatcaagtgttgggaaagaaaaaaggaagtggaatgggtaactcttcttgattaaaagttatgtaataaccaaatgcaatgtgaaatattttactggactctattttgaaaaaccatctgtaaaagactgaggtgggggtgggaggccagcacggtggtgaggcagttgagaaaatttgaatgtggattagattttgaatgatattggataattattggtaattttatgagctgtgagaagggtgttgtagtttataaaagactgtcttaatttgcatacttaagcatttaggaatgaagtgttagagtgtcttaaaatgtttcaaatggtttaacaaaatgtatgtgaggcgtatgtggcaaaatgttacagaatctaactggtggacatggctgttcattgtactgtttttttctatcttctatatgtttaaaagtatataataaaaatatttaatttttttttaaattagctgtatctgtgattgtatttcttttttgcatattattttgccctttggcccatattttgatatggatgccaccatagcattttgtgtatgtgcatgtgtattcccacttaatgtcacatttttcatgtctttacatattcttatttttgtttgtttttgagacagagtctcgctctgctgcccacgctggagtgcagtggtgcaatctcagctcactgcaacctctgctatccgggttcaagcagttctcgtgcctcacccacgtgagtagttgggattacaggcatgtggcaccatgccccactaagttttgtatttttagtagagatggagtttcaccatgttggccaggctggtctcaaactcctgccctcaagtgattcgaccaccctggcctcccaaagtgctgggattacagccgtgagccaccgcacacggcctctctatttatttctatacatagcttttcacattatattatgtttatatattgtttatatctgtatttcctctttcattagagaaaaggtagtacatcttattcttcatggtgtctacaatatctggcagtttttggaagtcaagcgtgagcttagagcatagactggtgggattgtcaaagaagagggcaactggaagagaactgtcagttatttttggatcagtctttaattcatcatgacgggttaggcattagttgtatttcttgctaattttgaagaagacttattaacaaatcctacattaggtaaatggttttgaaagttgagttaatcataatggtgtttgacctaggactatttttaggccctatttatcttaatatcgaataatgaagcagcttcccccttagatatagacagaaaacatcaaagccaccacactacctggctggatttatcctagtaataaaatcaaaactgagctagttctctggctttcattgtaataattgtccttgtggttgtaaggaatctagatgaaaattacatggtctgttctacagccacagctgtacctacattcagaagacagacaaaagttgctgtgtttgaagagatccttcattaagggatcagacagagattactttgagacatattctaagtttaacttttctgcagggttgccattaacagaaataaactacagagttaatttctttttgtttttgatacagtctaactctcacccaagctggagtgcagtggcgcaatttcagctcactgcaacctctgcctcccaggttcaagcaattctcctgcctcagcctcccgagcagctgggactacaggcatgtgccactatgcctggctaatttttgtatttttagtagtagagacgtggtttcgccacgttggccaggctggtctggaactcctgaccccaggtaatccacctgcctcggcctcccaaagtgctgggattacaagcttgagccactacgcctgacccagagttaactttttaaaaaagtttttatgaacttaagtcttgtgatgtttgaaataatggattcaatttagacatcaaattccagaagttactaagagcagctgggcgcggcagctcacacctgtaatcccagcactttgggaggccgaggcgggtggatcacctgagatcaggagttccagaccagcctggccaacatagtaaaaccctgtctctactaaaaatacaaaaattagcccggcatggtggcacgccctgtagtcccagctacttgggaggctgaggcaggagaattgcttgaacccgggaggtggaggttgtggtgagccgagattgtgccactgtactcaagcctgggctaaaaagcgagactccgtctcaaaaaaaaaaaaaaaaaaaacacgttactaagagcaactctgggccaggcacggtggcttacacctgtaatcccagcattttgggaggacgagacaggcggatcacttgagcccaggagttcaagaccagcataagcaacaacgcaaaacccctgactctacaa

SEQ ID NO: 9709 - skipped

SEQ ID NO: 9710 - DNA, 23 bp, synthetic construct
  source 1..23: mol_type = other DNA
atcccaaagaaaacaattattag

SEQ ID NO: 9711 - DNA, 23 bp, synthetic construct
  source 1..23: mol_type = other DNA
tatcccaaagaaaacaattatta

SEQ ID NO: 9712 - DNA, 23 bp, synthetic construct
  source 1..23: mol_type = other DNA
ttatcccaaagaaaacaattatt

SEQ ID NO: 9713 - DNA, 23 bp, synthetic construct
  source 1..23: mol_type = other DNA
gttatcccaaagaaaacaattat

SEQ ID NO: 9714 - DNA, 23 bp, synthetic construct
  source 1..23: mol_type = other DNA
agttatcccaaagaaaacaatta

SEQ ID NO: 9715 - DNA, 23 bp, synthetic construct
  source 1..23: mol_type = other DNA
aagttatcccaaagaaaacaatt

SEQ ID NO: 9716 - DNA, 23 bp, synthetic construct
  source 1..23: mol_type = other DNA
aaagttatcccaaagaaaacaat

SEQ ID NO: 9717 - DNA, 23 bp, synthetic construct
  source 1..23: mol_type = other DNA
aaaagttatcccaaagaaaacaa

SEQ ID NO: 9718 - DNA, 23 bp, synthetic construct
  source 1..23: mol_type = other DNA
taaaagttatcccaaagaaaaca

SEQ ID NO: 9719 - DNA, 23 bp, synthetic construct
  source 1..23: mol_type = other DNA
ttaaaagttatcccaaagaaaac

SEQ ID NO: 9720 - DNA, 23 bp, synthetic construct
  source 1..23: mol_type = other DNA
tttaaaagttatcccaaagaaaa

SEQ ID NO: 9721 - DNA, 23 bp, synthetic construct
  source 1..23: mol_type = other DNA
ctttaaaagttatcccaaagaaa

SEQ ID NO: 9722 - DNA, 23 bp, synthetic construct
  source 1..23: mol_type = other DNA
actttaaaagttatcccaaagaa

SEQ ID NO: 9723 - DNA, 23 bp, synthetic construct
  source 1..23: mol_type = other DNA
tactttaaaagttatcccaaaga

SEQ ID NO: 9724 - DNA, 23 bp, synthetic construct
  source 1..23: mol_type = other DNA
gtactttaaaagttatcccaaag

SEQ ID NO: 9725 - DNA, 23 bp, synthetic construct
  source 1..23: mol_type = other DNA
tgtactttaaaagttatcccaaa

SEQ ID NO: 9726 - DNA, 23 bp, synthetic construct
  source 1..23: mol_type = other DNA
atgtactttaaaagttatcccaa

SEQ ID NO: 9727 - DNA, 23 bp, synthetic construct
  source 1..23: mol_type = other DNA
aatgtactttaaaagttatccca

SEQ ID NO: 9728 - DNA, 23 bp, synthetic construct
  source 1..23: mol_type = other DNA
taatgtactttaaaagttatccc

SEQ ID NO: 9729 - DNA, 23 bp, synthetic construct
  source 1..23: mol_type = other DNA
ttaatgtactttaaaagttatcc

SEQ ID NO: 9730 - DNA, 23 bp, synthetic construct
  source 1..23: mol_type = other DNA
tttaatgtactttaaaagttatc

SEQ ID NO: 9731 - DNA, 23 bp, synthetic construct
  source 1..23: mol_type = other DNA
ttttaatgtactttaaaagttat

SEQ ID NO: 9732 - DNA, 23 bp, synthetic construct
  source 1..23: mol_type = other DNA
cttttaatgtactttaaaagtta

SEQ ID NO: 9733 - DNA, 23 bp, synthetic construct
  source 1..23: mol_type = other DNA
tcttttaatgtactttaaaagtt

SEQ ID NO: 9734 - DNA, 23 bp, synthetic construct
  source 1..23: mol_type = other DNA
gtcttttaatgtactttaaaagt

SEQ ID NO: 9735 - DNA, 23 bp, synthetic construct
  source 1..23: mol_type = other DNA
agtcttttaatgtactttaaaag

SEQ ID NO: 9736 - DNA, 23 bp, synthetic construct
  source 1..23: mol_type = other DNA
tagtcttttaatgtactttaaaa

SEQ ID NO: 9737 - DNA, 23 bp, synthetic construct
  source 1..23: mol_type = other DNA
atagtcttttaatgtactttaaa

SEQ ID NO: 9738 - DNA, 23 bp, synthetic construct
  source 1..23: mol_type = other DNA
gatagtcttttaatgtactttaa

SEQ ID NO: 9739 - DNA, 23 bp, synthetic construct
  source 1..23: mol_type = other DNA
tgatagtcttttaatgtacttta

SEQ ID NO: 9740 - DNA, 23 bp, synthetic construct
  source 1..23: mol_type = other DNA
ttgatagtcttttaatgtacttt

SEQ ID NO: 9741 - DNA, 23 bp, synthetic construct
  source 1..23: mol_type = other DNA
gttgatagtcttttaatgtactt

SEQ ID NO: 9742 - DNA, 23 bp, synthetic construct
  source 1..23: mol_type = other DNA
agttgatagtcttttaatgtact

SEQ ID NO: 9743 - DNA, 23 bp, synthetic construct
  source 1..23: mol_type = other DNA
aagttgatagtcttttaatgtac

SEQ ID NO: 9744 - DNA, 23 bp, synthetic construct
  source 1..23: mol_type = other DNA
taagttgatagtcttttaatgta

SEQ ID NO: 9745 - DNA, 23 bp, synthetic construct
  source 1..23: mol_type = other DNA
ttaagttgatagtcttttaatgt

SEQ ID NO: 9746 - DNA, 23 bp, synthetic construct
  source 1..23: mol_type = other DNA
attaagttgatagtcttttaatg

SEQ ID NO: 9747 - DNA, 23 bp, synthetic construct
  source 1..23: mol_type = other DNA
aattaagttgatagtcttttaat

SEQ ID NO: 9748 - DNA, 23 bp, synthetic construct
  source 1..23: mol_type = other DNA
aaattaagttgatagtcttttaa

SEQ ID NO: 9749 - DNA, 23 bp, synthetic construct
  source 1..23: mol_type = other DNA
gaaattaagttgatagtctttta

SEQ ID NO: 9750 - DNA, 23 bp, synthetic construct
  source 1..23: mol_type = other DNA
agaaattaagttgatagtctttt

SEQ ID NO: 9751 - DNA, 23 bp, synthetic construct
  source 1..23: mol_type = other DNA
cagaaattaagttgatagtcttt

SEQ ID NO: 9752 - DNA, 23 bp, synthetic construct
  source 1..23: mol_type = other DNA
tcagaaattaagttgatagtctt

SEQ ID NO: 9753 - DNA, 23 bp, synthetic construct
  source 1..23: mol_type = other DNA
atcagaaattaagttgatagtct

SEQ ID NO: 9754 - DNA, 23 bp, synthetic construct
  source 1..23: mol_type = other DNA
gatcagaaattaagttgatagtc

SEQ ID NO: 9755 - DNA, 23 bp, synthetic construct
  source 1..23: mol_type = other DNA
tgatcagaaattaagttgatagt

SEQ ID NO: 9756 - DNA, 23 bp, synthetic construct
  source 1..23: mol_type = other DNA
atgatcagaaattaagttgatag

SEQ ID NO: 9757 - DNA, 23 bp, synthetic construct
  source 1..23: mol_type = other DNA
tatgatcagaaattaagttgata

SEQ ID NO: 9758 - DNA, 23 bp, synthetic construct
  source 1..23: mol_type = other DNA
atatgatcagaaattaagttgat

SEQ ID NO: 9759 - DNA, 23 bp, synthetic construct
  source 1..23: mol_type = other DNA
aatatgatcagaaattaagttga

SEQ ID NO: 9760 - DNA, 23 bp, synthetic construct
  source 1..23: mol_type = other DNA
aaatatgatcagaaattaagttg

SEQ ID NO: 9761 - DNA, 23 bp, synthetic construct
  source 1..23: mol_type = other DNA
aaaatatgatcagaaattaagtt

SEQ ID NO: 9762 - DNA, 23 bp, synthetic construct
  source 1..23: mol_type = other DNA
caaaatatgatcagaaattaagt

SEQ ID NO: 9763 - DNA, 23 bp, synthetic construct
  source 1..23: mol_type = other DNA
acaaaatatgatcagaaattaag

SEQ ID NO: 9764 - DNA, 23 bp, synthetic construct
  source 1..23: mol_type = other DNA
aacaaaatatgatcagaaattaa

SEQ ID NO: 9765 - DNA, 23 bp, synthetic construct
  source 1..23: mol_type = other DNA
caacaaaatatgatcagaaatta

SEQ ID NO: 9766 - DNA, 23 bp, synthetic construct
  source 1..23: mol_type = other DNA
tcaacaaaatatgatcagaaatt

SEQ ID NO: 9767 - DNA, 23 bp, synthetic construct
  source 1..23: mol_type = other DNA
ttcaacaaaatatgatcagaaat

SEQ ID NO: 9768 - DNA, 23 bp, synthetic construct
  source 1..23: mol_type = other DNA
attcaacaaaatatgatcagaaa

SEQ ID NO: 9769 - DNA, 23 bp, synthetic construct
  source 1..23: mol_type = other DNA
tattcaacaaaatatgatcagaa

SEQ ID NO: 9770 - DNA, 23 bp, synthetic construct
  source 1..23: mol_type = other DNA
ttattcaacaaaatatgatcaga

SEQ ID NO: 9771 - DNA, 23 bp, synthetic construct
  source 1..23: mol_type = other DNA
tttattcaacaaaatatgatcag

SEQ ID NO: 9772 - DNA, 23 bp, synthetic construct
  source 1..23: mol_type = other DNA
ttttattcaacaaaatatgatca

SEQ ID NO: 9773 - DNA, 23 bp, synthetic construct
  source 1..23: mol_type = other DNA
attttattcaacaaaatatgatc

SEQ ID NO: 9774 - DNA, 23 bp, synthetic construct
  source 1..23: mol_type = other DNA
tattttattcaacaaaatatgat

SEQ ID NO: 9775 - DNA, 23 bp, synthetic construct
  source 1..23: mol_type = other DNA
ttattttattcaacaaaatatga

SEQ ID NO: 9776 - DNA, 23 bp, synthetic construct
  source 1..23: mol_type = other DNA
cttattttattcaacaaaatatg

SEQ ID NO: 9777 - DNA, 23 bp, synthetic construct
  source 1..23: mol_type = other DNA
acttattttattcaacaaaatat

SEQ ID NO: 9778 - DNA, 23 bp, synthetic construct
  source 1..23: mol_type = other DNA
tacttattttattcaacaaaata

SEQ ID NO: 9779 - DNA, 23 bp, synthetic construct
  source 1..23: mol_type = other DNA
ttacttattttattcaacaaaat

SEQ ID NO: 9780 - DNA, 23 bp, synthetic construct
  source 1..23: mol_type = other DNA
tttacttattttattcaacaaaa

SEQ ID NO: 9781 - DNA, 23 bp, synthetic construct
  source 1..23: mol_type = other DNA
ttttacttattttattcaacaaa

SEQ ID NO: 9782 - DNA, 23 bp, synthetic construct
  source 1..23: mol_type = other DNA
attttacttattttattcaacaa

SEQ ID NO: 9783 - DNA, 23 bp, synthetic construct
  source 1..23: mol_type = other DNA
cattttacttattttattcaaca

SEQ ID NO: 9784 - DNA, 23 bp, synthetic construct
  source 1..23: mol_type = other DNA
acattttacttattttattcaac

SEQ ID NO: 9785 - DNA, 23 bp, synthetic construct
  source 1..23: mol_type = other DNA
gacattttacttattttattcaa

SEQ ID NO: 9786 - DNA, 23 bp, synthetic construct
  source 1..23: mol_type = other DNA
agacattttacttattttattca

SEQ ID NO: 9787 - DNA, 23 bp, synthetic construct
  source 1..23: mol_type = other DNA
aagacattttacttattttattc

SEQ ID NO: 9788 - DNA, 23 bp, synthetic construct
  source 1..23: mol_type = other DNA
caagacattttacttattttatt

SEQ ID NO: 9789 - DNA, 23 bp, synthetic construct
  source 1..23: mol_type = other DNA
acaagacattttacttattttat

SEQ ID NO: 9790 - DNA, 23 bp, synthetic construct
  source 1..23: mol_type = other DNA
cacaagacattttacttatttta

SEQ ID NO: 9791 - DNA, 23 bp, synthetic construct
  source 1..23: mol_type = other DNA
tcacaagacattttacttatttt

SEQ ID NO: 9792 - DNA, 23 bp, synthetic construct
  source 1..23: mol_type = other DNA
ttcacaagacattttacttattt

SEQ ID NO: 9793 - DNA, 23 bp, synthetic construct
  source 1..23: mol_type = other DNA
tttcacaagacattttacttatt

SEQ ID NO: 9794 - DNA, 23 bp, synthetic construct
  source 1..23: mol_type = other DNA
gtttcacaagacattttacttat

SEQ ID NO: 9795 - DNA, 23 bp, synthetic construct
  source 1..23: mol_type = other DNA
tgtttcacaagacattttactta

SEQ ID NO: 9796 - DNA, 23 bp, synthetic construct
  source 1..23: mol_type = other DNA
ttgtttcacaagacattttactt

SEQ ID NO: 9797 - DNA, 23 bp, synthetic construct
  source 1..23: mol_type = other DNA
tttgtttcacaagacattttact

SEQ ID NO: 9798 - DNA, 23 bp, synthetic construct
  source 1..23: mol_type = other DNA
ttttgtttcacaagacattttac

SEQ ID NO: 9799 - DNA, 23 bp, synthetic construct
  source 1..23: mol_type = other DNA
attttgtttcacaagacatttta

SEQ ID NO: 9800 - DNA, 23 bp, synthetic construct
  source 1..23: mol_type = other DNA
cattttgtttcacaagacatttt

SEQ ID NO: 9801 - DNA, 23 bp, synthetic construct
  source 1..23: mol_type = other DNA
gcattttgtttcacaagacattt

SEQ ID NO: 9802 - DNA, 23 bp, synthetic construct
  source 1..23: mol_type = other DNA
agcattttgtttcacaagacatt

SEQ ID NO: 9803 - DNA, 23 bp, synthetic construct
  source 1..23: mol_type = other DNA
aagcattttgtttcacaagacat

SEQ ID NO: 9804 - DNA, 23 bp, synthetic construct
  source 1..23: mol_type = other DNA
aaagcattttgtttcacaagaca

SEQ ID NO: 9805 - DNA, 23 bp, synthetic construct
  source 1..23: mol_type = other DNA
aaaagcattttgtttcacaagac

SEQ ID NO: 9806 - DNA, 23 bp, synthetic construct
  source 1..23: mol_type = other DNA
aaaaagcattttgtttcacaaga

SEQ ID NO: 9807 - DNA, 23 bp, synthetic construct
  source 1..23: mol_type = other DNA
taaaaagcattttgtttcacaag

SEQ ID NO: 9808 - DNA, 23 bp, synthetic construct
  source 1..23: mol_type = other DNA
ttaaaaagcattttgtttcacaa

SEQ ID NO: 9809 - DNA, 23 bp, synthetic construct
  source 1..23: mol_type = other DNA
gttaaaaagcattttgtttcaca

SEQ ID NO: 9810 - DNA, 23 bp, synthetic construct
  source 1..23: mol_type = other DNA
tgttaaaaagcattttgtttcac

SEQ ID NO: 9811 - DNA, 23 bp, synthetic construct
  source 1..23: mol_type = other DNA
atgttaaaaagcattttgtttca

SEQ ID NO: 9812 - DNA, 23 bp, synthetic construct
  source 1..23: mol_type = other DNA
gatgttaaaaagcattttgtttc

SEQ ID NO: 9813 - DNA, 23 bp, synthetic construct
  source 1..23: mol_type = other DNA
ggatgttaaaaagcattttgttt

SEQ ID NO: 9814 - DNA, 23 bp, synthetic construct
  source 1..23: mol_type = other DNA
tggatgttaaaaagcattttgtt

SEQ ID NO: 9815 - DNA, 23 bp, synthetic construct
  source 1..23: mol_type = other DNA
atggatgttaaaaagcattttgt

SEQ ID NO: 9816 - DNA, 23 bp, synthetic construct
  source 1..23: mol_type = other DNA
tatggatgttaaaaagcattttg

SEQ ID NO: 9817 - DNA, 23 bp, synthetic construct
  source 1..23: mol_type = other DNA
atatggatgttaaaaagcatttt

SEQ ID NO: 9818 - DNA, 23 bp, synthetic construct
  source 1..23: mol_type = other DNA
tatatggatgttaaaaagcattt

SEQ ID NO: 9819 - DNA, 23 bp, synthetic construct
  source 1..23: mol_type = other DNA
ttatatggatgttaaaaagcatt

SEQ ID NO: 9820 - DNA, 23 bp, synthetic construct
  source 1..23: mol_type = other DNA
tttatatggatgttaaaaagcat

SEQ ID NO: 9821 - DNA, 23 bp, synthetic construct
  source 1..23: mol_type = other DNA
ctttatatggatgttaaaaagca

SEQ ID NO: 9822 - DNA, 23 bp, synthetic construct
  source 1..23: mol_type = other DNA
gctttatatggatgttaaaaagc

SEQ ID NO: 9823 - DNA, 23 bp, synthetic construct
  source 1..23: mol_type = other DNA
agctttatatggatgttaaaaag

SEQ ID NO: 9824 - DNA, 23 bp, synthetic construct
  source 1..23: mol_type = other DNA
tagctttatatggatgttaaaaa

SEQ ID NO: 9825 - DNA, 23 bp, synthetic construct
  source 1..23: mol_type = other DNA
atagctttatatggatgttaaaa

SEQ ID NO: 9826 - DNA, 23 bp, synthetic construct
  source 1..23: mol_type = other DNA
gatagctttatatggatgttaaa

SEQ ID NO: 9827 - DNA, 23 bp, synthetic construct
  source 1..23: mol_type = other DNA
agatagctttatatggatgttaa

SEQ ID NO: 9828 - DNA, 23 bp, synthetic construct
  source 1..23: mol_type = other DNA
tagatagctttatatggatgtta

SEQ ID NO: 9829 - DNA, 23 bp, synthetic construct
  source 1..23: mol_type = other DNA
atagatagctttatatggatgtt

SEQ ID NO: 9830 - DNA, 23 bp, synthetic construct
  source 1..23: mol_type = other DNA
tatagatagctttatatggatgt

SEQ ID NO: 9831 - DNA, 23 bp, synthetic construct
  source 1..23: mol_type = other DNA
atatagatagctttatatggatg

SEQ ID NO: 9832 - DNA, 23 bp, synthetic construct
  source 1..23: mol_type = other DNA
tatatagatagctttatatggat

SEQ ID NO: 9833 - DNA, 23 bp, synthetic construct
  source 1..23: mol_type = other DNA
atatatagatagctttatatgga

SEQ ID NO: 9834 - DNA, 23 bp, synthetic construct
  source 1..23: mol_type = other DNA
tatatatagatagctttatatgg

SEQ ID NO: 9835 - DNA, 23 bp, synthetic construct
  source 1..23: mol_type = other DNA
ctatatatagatagctttatatg

SEQ ID NO: 9836 - DNA, 23 bp, synthetic construct
  source 1..23: mol_type = other DNA
gctatatatagatagctttatat

SEQ ID NO: 9837 - DNA, 23 bp, synthetic construct
  source 1..23: mol_type = other DNA
agctatatatagatagctttata

SEQ ID NO: 9838 - DNA, 23 bp, synthetic construct
  source 1..23: mol_type = other DNA
tagctatatatagatagctttat

SEQ ID NO: 9839 - DNA, 23 bp, synthetic construct
  source 1..23: mol_type = other DNA
atagctatatatagatagcttta

SEQ ID NO: 9840 - DNA, 23 bp, synthetic construct
  source 1..23: mol_type = other DNA
gatagctatatatagatagcttt

SEQ ID NO: 9841 - DNA, 23 bp, synthetic construct
  source 1..23: mol_type = other DNA
agatagctatatatagatagctt

SEQ ID NO: 9842 - DNA, 23 bp, synthetic construct
  source 1..23: mol_type = other DNA
tagatagctatatatagatagct

SEQ ID NO: 9843 - DNA, 23 bp, synthetic construct
  source 1..23: mol_type = other DNA
atagatagctatatatagatagc

SEQ ID NO: 9844 - DNA, 23 bp, synthetic construct
  source 1..23: mol_type = other DNA
tatagatagctatatatagatag

SEQ ID NO: 9845 - DNA, 23 bp, synthetic construct
  source 1..23: mol_type = other DNA
atatagatagctatatatagata

SEQ ID NO: 9846 - DNA, 23 bp, synthetic construct
  source 1..23: mol_type = other DNA
gatatagatagctatatatagat

SEQ ID NO: 9847 - DNA, 23 bp, synthetic construct
  source 1..23: mol_type = other DNA
agatatagatagctatatataga

SEQ ID NO: 9848 - DNA, 23 bp, synthetic construct
  source 1..23: mol_type = other DNA
tagatatagatagctatatatag

SEQ ID NO: 9849 - DNA, 23 bp, synthetic construct
  source 1..23: mol_type = other DNA
atagatatagatagctatatata

SEQ ID NO: 9850 - DNA, 23 bp, synthetic construct
  source 1..23: mol_type = other DNA
tatagatatagatagctatatat

SEQ ID NO: 9851 - DNA, 23 bp, synthetic construct
  source 1..23: mol_type = other DNA
atatagatatagatagctatata

SEQ ID NO: 9852 - DNA, 23 bp, synthetic construct
  source 1..23: mol_type = other DNA
tatatagatatagatagctatat

SEQ ID NO: 9853 - DNA, 23 bp, synthetic construct
  source 1..23: mol_type = other DNA
ctatatagatatagatagctata

SEQ ID NO: 9854 - DNA, 23 bp, synthetic construct
  source 1..23: mol_type = other DNA
gctatatagatatagatagctat

SEQ ID NO: 9855 - DNA, 23 bp, synthetic construct
  source 1..23: mol_type = other DNA
agctatatagatatagatagcta

SEQ ID NO: 9856 - DNA, 23 bp, synthetic construct
  source 1..23: mol_type = other DNA
tagctatatagatatagatagct

SEQ ID NO: 9857 - DNA, 23 bp, synthetic construct
  source 1..23: mol_type = other DNA
atagctatatagatatagatagc

SEQ ID NO: 9858 - DNA, 23 bp, synthetic construct
  source 1..23: mol_type = other DNA
aatagctatatagatatagatag

SEQ ID NO: 9859 - DNA, 23 bp, synthetic construct
  source 1..23: mol_type = other DNA
aaatagctatatagatatagata

SEQ ID NO: 9860 - DNA, 23 bp, synthetic construct
  source 1..23: mol_type = other DNA
aaaatagctatatagatatagat

SEQ ID NO: 9861 - DNA, 23 bp, synthetic construct
  source 1..23: mol_type = other DNA
aaaaatagctatatagatataga

SEQ ID NO: 9862 - DNA, 23 bp, synthetic construct
  source 1..23: mol_type = other DNA
aaaaaatagctatatagatatag

SEQ ID NO: 9863 - DNA, 23 bp, synthetic construct
  source 1..23: mol_type = other DNA
aaaaaaatagctatatagatata

SEQ ID NO: 9864 - DNA, 23 bp, synthetic construct
  source 1..23: mol_type = other DNA
aaaaaaaatagctatatagatat

SEQ ID NO: 9865 - DNA, 23 bp, synthetic construct
  source 1..23: mol_type = other DNA
taaaaaaaatagctatatagata

SEQ ID NO: 9866 - DNA, 23 bp, synthetic construct
  source 1..23: mol_type = other DNA
ttaaaaaaaatagctatatagat

SEQ ID NO: 9867 - DNA, 23 bp, synthetic construct
  source 1..23: mol_type = other DNA
gttaaaaaaaatagctatataga

SEQ ID NO: 9868 - DNA, 23 bp, synthetic construct
  source 1..23: mol_type = other DNA
agttaaaaaaaatagctatatag

SEQ ID NO: 9869 - DNA, 23 bp, synthetic construct
  source 1..23: mol_type = other DNA
aagttaaaaaaaatagctatata

SEQ ID NO: 9870 - DNA, 23 bp, synthetic construct
  source 1..23: mol_type = other DNA
gaagttaaaaaaaatagctatat

SEQ ID NO: 9871 - DNA, 23 bp, synthetic construct
  source 1..23: mol_type = other DNA
ggaagttaaaaaaaatagctata

SEQ ID NO: 9872 - DNA, 23 bp, synthetic construct
  source 1..23: mol_type = other DNA
aggaagttaaaaaaaatagctat

SEQ ID NO: 9873 - DNA, 23 bp, synthetic construct
  source 1..23: mol_type = other DNA
aaggaagttaaaaaaaatagcta

SEQ ID NO: 9874 - DNA, 23 bp, synthetic construct
  source 1..23: mol_type = other DNA
aaaggaagttaaaaaaaatagct

SEQ ID NO: 9875 - DNA, 23 bp, synthetic construct
  source 1..23: mol_type = other DNA
taaaggaagttaaaaaaaatagc

SEQ ID NO: 9876 - DNA, 23 bp, synthetic construct
  source 1..23: mol_type = other DNA
ataaaggaagttaaaaaaaatag

SEQ ID NO: 9877 - DNA, 23 bp, synthetic construct
  source 1..23: mol_type = other DNA
aataaaggaagttaaaaaaaata

SEQ ID NO: 9878 - DNA, 23 bp, synthetic construct
  source 1..23: mol_type = other DNA
aaataaaggaagttaaaaaaaat

SEQ ID NO: 9879 - DNA, 23 bp, synthetic construct
  source 1..23: mol_type = other DNA
aaaataaaggaagttaaaaaaaa

SEQ ID NO: 9880 - DNA, 23 bp, synthetic construct
  source 1..23: mol_type = other DNA
gaaaataaaggaagttaaaaaaa

SEQ ID NO: 9881 - DNA, 23 bp, synthetic construct
  source 1..23: mol_type = other DNA
ggaaaataaaggaagttaaaaaa

SEQ ID NO: 9882 - DNA, 23 bp, synthetic construct
  source 1..23: mol_type = other DNA
aggaaaataaaggaagttaaaaa

SEQ ID NO: 9883 - DNA, 23 bp, synthetic construct
  source 1..23: mol_type = other DNA
aaggaaaataaaggaagttaaaa

SEQ ID NO: 9884 - DNA, 23 bp, synthetic construct
  source 1..23: mol_type = other DNA
taaggaaaataaaggaagttaaa

SEQ ID NO: 9885 - DNA, 23 bp, synthetic construct
  source 1..23: mol_type = other DNA
gtaaggaaaataaaggaagttaa

SEQ ID NO: 9886 - DNA, 23 bp, synthetic construct
  source 1..23: mol_type = other DNA
tgtaaggaaaataaaggaagtta

SEQ ID NO: 9887 - DNA, 23 bp, synthetic construct
  source 1..23: mol_type = other DNA
ctgtaaggaaaataaaggaagtt

SEQ ID NO: 9888 - DNA, 23 bp, synthetic construct
  source 1..23: mol_type = other DNA
cctgtaaggaaaataaaggaagt

SEQ ID NO: 9889 - DNA, 23 bp, synthetic construct
  source 1..23: mol_type = other DNA
ccctgtaaggaaaataaaggaag

SEQ ID NO: 9890 - DNA, 23 bp, synthetic construct
  source 1..23: mol_type = other DNA
accctgtaaggaaaataaaggaa

SEQ ID NO: 9891 - DNA, 23 bp, synthetic construct
  source 1..23: mol_type = other DNA
aaccctgtaaggaaaataaagga

SEQ ID NO: 9892 - DNA, 23 bp, synthetic construct
  source 1..23: mol_type = other DNA
aaaccctgtaaggaaaataaagg

SEQ ID NO: 9893 - DNA, 23 bp, synthetic construct
  source 1..23: mol_type = other DNA
aaaaccctgtaaggaaaataaag

SEQ ID NO: 9894 - DNA, 23 bp, synthetic construct
  source 1..23: mol_type = other DNA
taaaaccctgtaaggaaaataaa

SEQ ID NO: 9895 - DNA, 23 bp, synthetic construct
  source 1..23: mol_type = other DNA
ctaaaaccctgtaaggaaaataa

SEQ ID NO: 9896 - DNA, 23 bp, synthetic construct
  source 1..23: mol_type = other DNA
tctaaaaccctgtaaggaaaata

SEQ ID NO: 9897 - DNA, 23 bp, synthetic construct
  source 1..23: mol_type = other DNA
gtctaaaaccctgtaaggaaaat

SEQ ID NO: 9898 - DNA, 23 bp, synthetic construct
  source 1..23: mol_type = other DNA
tgtctaaaaccctgtaaggaaaa

SEQ ID NO: 9899 - DNA, 23 bp, synthetic construct
  source 1..23: mol_type = other DNA
ttgtctaaaaccctgtaaggaaa

SEQ ID NO: 9900 - DNA, 23 bp, synthetic construct
  source 1..23: mol_type = other DNA
tttgtctaaaaccctgtaaggaa

SEQ ID NO: 9901 - DNA, 23 bp, synthetic construct
  source 1..23: mol_type = other DNA
ttttgtctaaaaccctgtaagga

SEQ ID NO: 9902 - DNA, 23 bp, synthetic construct
  source 1..23: mol_type = other DNA
attttgtctaaaaccctgtaagg

SEQ ID NO: 9903 - DNA, 23 bp, synthetic construct
  source 1..23: mol_type = other DNA
gattttgtctaaaaccctgtaag

SEQ ID NO: 9904 - DNA, 23 bp, synthetic construct
  source 1..23: mol_type = other DNA
tgattttgtctaaaaccctgtaa

SEQ ID NO: 9905 - DNA, 23 bp, synthetic construct
  source 1..23: mol_type = other DNA
ttgattttgtctaaaaccctgta

SEQ ID NO: 9906 - DNA, 23 bp, synthetic construct
  source 1..23: mol_type = other DNA
tttgattttgtctaaaaccctgt

SEQ ID NO: 9907 - DNA, 23 bp, synthetic construct
  source 1..23: mol_type = other DNA
ttttgattttgtctaaaaccctg

SEQ ID NO: 9908 - DNA, 23 bp, synthetic construct
  source 1..23: mol_type = other DNA
tttttgattttgtctaaaaccct

SEQ ID NO: 9909 - DNA, 23 bp, synthetic construct
  source 1..23: mol_type = other DNA
ctttttgattttgtctaaaaccc

SEQ ID NO: 9910 - DNA, 23 bp, synthetic construct
  source 1..23: mol_type = other DNA
tctttttgattttgtctaaaacc

SEQ ID NO: 9911 - DNA, 23 bp, synthetic construct
  source 1..23: mol_type = other DNA
ttctttttgattttgtctaaaac

SEQ ID NO: 9912 - DNA, 23 bp, synthetic construct
  source 1..23: mol_type = other DNA
cttctttttgattttgtctaaaa

SEQ ID NO: 9913 - DNA, 23 bp, synthetic construct
  source 1..23: mol_type = other DNA
ccttctttttgattttgtctaaa

SEQ ID NO: 9914 - DNA, 23 bp, synthetic construct
  source 1..23: mol_type = other DNA
tccttctttttgattttgtctaa

SEQ ID NO: 9915 - DNA, 23 bp, synthetic construct
  source 1..23: mol_type = other DNA
ttccttctttttgattttgtcta

SEQ ID NO: 9916 - DNA, 23 bp, synthetic construct
  source 1..23: mol_type = other DNA
cttccttctttttgattttgtct

SEQ ID NO: 9917 - DNA, 23 bp, synthetic construct
  source 1..23: mol_type = other DNA
ccttccttctttttgattttgtc

SEQ ID NO: 9918 - DNA, 23 bp, synthetic construct
  source 1..23: mol_type = other DNA
accttccttctttttgattttgt

SEQ ID NO: 9919 - DNA, 23 bp, synthetic construct
  source 1..23: mol_type = other DNA
caccttccttctttttgattttg

SEQ ID NO: 9920 - DNA, 23 bp, synthetic construct
  source 1..23: mol_type = other DNA
gcaccttccttctttttgatttt

SEQ ID NO: 9921 - DNA, 23 bp, synthetic construct
  source 1..23: mol_type = other DNA
agcaccttccttctttttgattt

SEQ ID NO: 9922 - DNA, 23 bp, synthetic construct
  source 1..23: mol_type = other DNA
gagcaccttccttctttttgatt

SEQ ID NO: 9923 - DNA, 23 bp, synthetic construct
  source 1..23: mol_type = other DNA
tgagcaccttccttctttttgat

SEQ ID NO: 9924 - DNA, 23 bp, synthetic construct
  source 1..23: mol_type = other DNA
gtgagcaccttccttctttttga

SEQ ID NO: 9925 - DNA, 23 bp, synthetic construct
  source 1..23: mol_type = other DNA
tgtgagcaccttccttctttttg

SEQ ID NO: 9926 - DNA, 23 bp, synthetic construct
  source 1..23: mol_type = other DNA
atgtgagcaccttccttcttttt

SEQ ID NO: 9927 - DNA, 23 bp, synthetic construct
  source 1..23: mol_type = other DNA
aatgtgagcaccttccttctttt

SEQ ID NO: 9928 - DNA, 23 bp, synthetic construct
  source 1..23: mol_type = other DNA
gaatgtgagcaccttccttcttt

SEQ ID NO: 9929 - DNA, 23 bp, synthetic construct
  source 1..23: mol_type = other DNA
ggaatgtgagcaccttccttctt

SEQ ID NO: 9930 - DNA, 23 bp, synthetic construct
  source 1..23: mol_type = other DNA
aggaatgtgagcaccttccttct

SEQ ID NO: 9931 - DNA, 23 bp, synthetic construct
  source 1..23: mol_type = other DNA
aaggaatgtgagcaccttccttc

SEQ ID NO: 9932 - DNA, 23 bp, synthetic construct
  source 1..23: mol_type = other DNA
taaggaatgtgagcaccttcctt

SEQ ID NO: 9933 - DNA, 23 bp, synthetic construct
  source 1..23: mol_type = other DNA
ttaaggaatgtgagcaccttcct

SEQ ID NO: 9934 - DNA, 23 bp, synthetic construct
  source 1..23: mol_type = other DNA
tttaaggaatgtgagcaccttcc

SEQ ID NO: 9935 - DNA, 23 bp, synthetic construct
  source 1..23: mol_type = other DNA
atttaaggaatgtgagcaccttc

SEQ ID NO: 9936 - DNA, 23 bp, synthetic construct
  source 1..23: mol_type = other DNA
aatttaaggaatgtgagcacctt

SEQ ID NO: 9937 - DNA, 23 bp, synthetic construct
  source 1..23: mol_type = other DNA
taatttaaggaatgtgagcacct

SEQ ID NO: 9938 - DNA, 23 bp, synthetic construct
  source 1..23: mol_type = other DNA
ttaatttaaggaatgtgagcacc

SEQ ID NO: 9939 - DNA, 23 bp, synthetic construct
  source 1..23: mol_type = other DNA
cttaatttaaggaatgtgagcac

SEQ ID NO: 9940 - DNA, 23 bp, synthetic construct
  source 1..23: mol_type = other DNA
ccttaatttaaggaatgtgagca

SEQ ID NO: 9941 - DNA, 23 bp, synthetic construct
  source 1..23: mol_type = other DNA
tccttaatttaaggaatgtgagc

SEQ ID NO: 9942 - DNA, 23 bp, synthetic construct
  source 1..23: mol_type = other DNA
ctccttaatttaaggaatgtgag

SEQ ID NO: 9943 - DNA, 23 bp, synthetic construct
  source 1..23: mol_type = other DNA
actccttaatttaaggaatgtga

SEQ ID NO: 9944 - DNA, 23 bp, synthetic construct
  source 1..23: mol_type = other DNA
tactccttaatttaaggaatgtg

SEQ ID NO: 9945 - DNA, 23 bp, synthetic construct
  source 1..23: mol_type = other DNA
ttactccttaatttaaggaatgt

SEQ ID NO: 9946 - DNA, 23 bp, synthetic construct
  source 1..23: mol_type = other DNA
cttactccttaatttaaggaatg

SEQ ID NO: 9947 - DNA, 23 bp, synthetic construct
  source 1..23: mol_type = other DNA
acttactccttaatttaaggaat

SEQ ID NO: 9948 - DNA, 23 bp, synthetic construct
  source 1..23: mol_type = other DNA
gacttactccttaatttaaggaa

SEQ ID NO: 9949 - DNA, 23 bp, synthetic construct
  source 1..23: mol_type = other DNA
agacttactccttaatttaagga

SEQ ID NO: 9950 - DNA, 23 bp, synthetic construct
  source 1..23: mol_type = other DNA
cagacttactccttaatttaagg

SEQ ID NO: 9951 - DNA, 23 bp, synthetic construct
  source 1..23: mol_type = other DNA
gcagacttactccttaatttaag

SEQ ID NO: 9952 - DNA, 23 bp, synthetic construct
  source 1..23: mol_type = other DNA
ggcagacttactccttaatttaa

SEQ ID NO: 9953 - DNA, 23 bp, synthetic construct
  source 1..23: mol_type = other DNA
tggcagacttactccttaattta

SEQ ID NO: 9954 - DNA, 23 bp, synthetic construct
  source 1..23: mol_type = other DNA
ctggcagacttactccttaattt

SEQ ID NO: 9955 - DNA, 23 bp, synthetic construct
  source 1..23: mol_type = other DNA
gctggcagacttactccttaatt

SEQ ID NO: 9956 - DNA, 23 bp, synthetic construct
  source 1..23: mol_type = other DNA
tgctggcagacttactccttaat

SEQ ID NO: 9957 - DNA, 23 bp, synthetic construct
  source 1..23: mol_type = other DNA
atgctggcagacttactccttaa

SEQ ID NO: 9958 - DNA, 23 bp, synthetic construct
  source 1..23: mol_type = other DNA
aatgctggcagacttactcctta

SEQ ID NO: 9959 - DNA, 23 bp, synthetic construct
  source 1..23: mol_type = other DNA
taatgctggcagacttactcctt

SEQ ID NO: 9960 - DNA, 23 bp, synthetic construct
  source 1..23: mol_type = other DNA
ataatgctggcagacttactcct

SEQ ID NO: 9961 - DNA, 23 bp, synthetic construct
  source 1..23: mol_type = other DNA
cataatgctggcagacttactcc

SEQ ID NO: 9962 - DNA, 23 bp, synthetic construct
  source 1..23: mol_type = other DNA
tcataatgctggcagacttactc

SEQ ID NO: 9963 - DNA, 23 bp, synthetic construct
  source 1..23: mol_type = other DNA
ttcataatgctggcagacttact

SEQ ID NO: 9964 - DNA, 23 bp, synthetic construct
  source 1..23: mol_type = other DNA
tttcataatgctggcagacttac

SEQ ID NO: 9965 - DNA, 23 bp, synthetic construct
  source 1..23: mol_type = other DNA
ctttcataatgctggcagactta

SEQ ID NO: 9966 - DNA, 23 bp, synthetic construct
  source 1..23: mol_type = other DNA
actttcataatgctggcagactt

SEQ ID NO: 9967 - DNA, 23 bp, synthetic construct
  source 1..23: mol_type = other DNA
cactttcataatgctggcagact

SEQ ID NO: 9968 - DNA, 23 bp, synthetic construct
  source 1..23: mol_type = other DNA
tcactttcataatgctggcagac

SEQ ID NO: 9969 - DNA, 23 bp, synthetic construct
  source 1..23: mol_type = other DNA
ttcactttcataatgctggcaga

SEQ ID NO: 9970 - DNA, 23 bp, synthetic construct
  source 1..23: mol_type = other DNA
attcactttcataatgctggcag

SEQ ID NO: 9971 - DNA, 23 bp, synthetic construct
  source 1..23: mol_type = other DNA
gattcactttcataatgctggca

SEQ ID NO: 9972 - DNA, 23 bp, synthetic construct
  source 1..23: mol_type = other DNA
agattcactttcataatgctggc

SEQ ID NO: 9973 - DNA, 23 bp, synthetic construct
  source 1..23: mol_type = other DNA
aagattcactttcataatgctgg

SEQ ID NO: 9974 - DNA, 23 bp, synthetic construct
  source 1..23: mol_type = other DNA
taagattcactttcataatgctg

SEQ ID NO: 9975 - DNA, 23 bp, synthetic construct
  source 1..23: mol_type = other DNA
gtaagattcactttcataatgct

SEQ ID NO: 9976 - DNA, 23 bp, synthetic construct
  source 1..23: mol_type = other DNA
agtaagattcactttcataatgc

SEQ ID NO: 9977 - DNA, 23 bp, synthetic construct
  source 1..23: mol_type = other DNA
aagtaagattcactttcataatg

SEQ ID NO: 9978 - DNA, 23 bp, synthetic construct
  source 1..23: mol_type = other DNA
aaagtaagattcactttcataat

SEQ ID NO: 9979 - DNA, 23 bp, synthetic construct
  source 1..23: mol_type = other DNA
aaaagtaagattcactttcataa

SEQ ID NO: 9980 - DNA, 23 bp, synthetic construct
  source 1..23: mol_type = other DNA
caaaagtaagattcactttcata

SEQ ID NO: 9981 - DNA, 23 bp, synthetic construct
  source 1..23: mol_type = other DNA
acaaaagtaagattcactttcat

SEQ ID NO: 9982 - DNA, 23 bp, synthetic construct
  source 1..23: mol_type = other DNA
tacaaaagtaagattcactttca

SEQ ID NO: 9983 - DNA, 23 bp, synthetic construct
  source 1..23: mol_type = other DNA
ttacaaaagtaagattcactttc

SEQ ID NO: 9984 - DNA, 23 bp, synthetic construct
  source 1..23: mol_type = other DNA
tttacaaaagtaagattcacttt

SEQ ID NO: 9985 - DNA, 23 bp, synthetic construct
  source 1..23: mol_type = other DNA
ttttacaaaagtaagattcactt

SEQ ID NO: 9986 - DNA, 23 bp, synthetic construct
  source 1..23: mol_type = other DNA
gttttacaaaagtaagattcact

SEQ ID NO: 9987 - DNA, 23 bp, synthetic construct
  source 1..23: mol_type = other DNA
agttttacaaaagtaagattcac

SEQ ID NO: 9988 - DNA, 23 bp, synthetic construct
  source 1..23: mol_type = other DNA
aagttttacaaaagtaagattca

SEQ ID NO: 9989 - DNA, 23 bp, synthetic construct
  source 1..23: mol_type = other DNA
aaagttttacaaaagtaagattc

SEQ ID NO: 9990 - DNA, 23 bp, synthetic construct
  source 1..23: mol_type = other DNA
taaagttttacaaaagtaagatt

SEQ ID NO: 9991 - DNA, 23 bp, synthetic construct
  source 1..23: mol_type = other DNA
ataaagttttacaaaagtaagat

SEQ ID NO: 9992 - DNA, 23 bp, synthetic construct
  source 1..23: mol_type = other DNA
cataaagttttacaaaagtaaga

SEQ ID NO: 9993 - DNA, 23 bp, synthetic construct
  source 1..23: mol_type = other DNA
ccataaagttttacaaaagtaag

SEQ ID NO: 9994 - DNA, 23 bp, synthetic construct
  source 1..23: mol_type = other DNA
accataaagttttacaaaagtaa

SEQ ID NO: 9995 - DNA, 23 bp, synthetic construct
  source 1..23: mol_type = other DNA
aaccataaagttttacaaaagta

SEQ ID NO: 9996 - DNA, 23 bp, synthetic construct
  source 1..23: mol_type = other DNA
aaaccataaagttttacaaaagt

SEQ ID NO: 9997 - DNA, 23 bp, synthetic construct
  source 1..23: mol_type = other DNA
caaaccataaagttttacaaaag

SEQ ID NO: 9998 - DNA, 23 bp, synthetic construct
  source 1..23: mol_type = other DNA
acaaaccataaagttttacaaaa

SEQ ID NO: 9999 - DNA, 23 bp, synthetic construct
  source 1..23: mol_type = other DNA
cacaaaccataaagttttacaaa

SEQ ID NO: 10000 - DNA, 23 bp, synthetic construct
  source 1..23: mol_type = other DNA
ccacaaaccataaagttttacaa

SEQ ID NO: 10001 - DNA, 23 bp, synthetic construct
  source 1..23: mol_type = other DNA
tccacaaaccataaagttttaca

SEQ ID NO: 10002 - DNA, 23 bp, synthetic construct
  source 1..23: mol_type = other DNA
ttccacaaaccataaagttttac

SEQ ID NO: 10003 - DNA, 23 bp, synthetic construct
  source 1..23: mol_type = other DNA
tttccacaaaccataaagtttta

SEQ ID NO: 10004 - DNA, 23 bp, synthetic construct
  source 1..23: mol_type = other DNA
ttttccacaaaccataaagtttt

SEQ ID NO: 10005 - DNA, 23 bp, synthetic construct
  source 1..23: mol_type = other DNA
gttttccacaaaccataaagttt

SEQ ID NO: 10006 - DNA, 23 bp, synthetic construct
  source 1..23: mol_type = other DNA
tgttttccacaaaccataaagtt

SEQ ID NO: 10007 - DNA, 23 bp, synthetic construct
  source 1..23: mol_type = other DNA
ttgttttccacaaaccataaagt

SEQ ID NO: 10008 - DNA, 23 bp, synthetic construct
  source 1..23: mol_type = other DNA
tttgttttccacaaaccataaag

SEQ ID NO: 10009 - DNA, 23 bp, synthetic construct
  source 1..23: mol_type = other DNA
atttgttttccacaaaccataaa

SEQ ID NO: 10010 - DNA, 23 bp, synthetic construct
  source 1..23: mol_type = other DNA
catttgttttccacaaaccataa

SEQ ID NO: 10011 - DNA, 23 bp, synthetic construct
  source 1..23: mol_type = other DNA
acatttgttttccacaaaccata

SEQ ID NO: 10012 - DNA, 23 bp, synthetic construct
  source 1..23: mol_type = other DNA
aacatttgttttccacaaaccat

SEQ ID NO: 10013 - DNA, 23 bp, synthetic construct
  source 1..23: mol_type = other DNA
aaacatttgttttccacaaacca

SEQ ID NO: 10014 - DNA, 23 bp, synthetic construct
  source 1..23: mol_type = other DNA
aaaacatttgttttccacaaacc

SEQ ID NO: 10015 - DNA, 23 bp, synthetic construct
  source 1..23: mol_type = other DNA
aaaaacatttgttttccacaaac

SEQ ID NO: 10016 - DNA, 23 bp, synthetic construct
  source 1..23: mol_type = other DNA
caaaaacatttgttttccacaaa

SEQ ID NO: 10017 - DNA, 23 bp, synthetic construct
  source 1..23: mol_type = other DNA
tcaaaaacatttgttttccacaa

SEQ ID NO: 10018 - DNA, 23 bp, synthetic construct
  source 1..23: mol_type = other DNA
ttcaaaaacatttgttttccaca

SEQ ID NO: 10019 - DNA, 23 bp, synthetic construct
  source 1..23: mol_type = other DNA
gttcaaaaacatttgttttccac

SEQ ID NO: 10020 - DNA, 23 bp, synthetic construct
  source 1..23: mol_type = other DNA
tgttcaaaaacatttgttttcca

SEQ ID NO: 10021 - DNA, 23 bp, synthetic construct
  source 1..23: mol_type = other DNA
atgttcaaaaacatttgttttcc

SEQ ID NO: 10022 - DNA, 23 bp, synthetic construct
  source 1..23: mol_type = other DNA
aatgttcaaaaacatttgttttc

SEQ ID NO: 10023 - DNA, 23 bp, synthetic construct
  source 1..23: mol_type = other DNA
aaatgttcaaaaacatttgtttt

SEQ ID NO: 10024 - DNA, 23 bp, synthetic construct
  source 1..23: mol_type = other DNA
taaatgttcaaaaacatttgttt

SEQ ID NO: 10025 - DNA, 23 bp, synthetic construct
  source 1..23: mol_type = other DNA
ttaaatgttcaaaaacatttgtt

SEQ ID NO: 10026 - DNA, 23 bp, synthetic construct
  source 1..23: mol_type = other DNA
tttaaatgttcaaaaacatttgt

SEQ ID NO: 10027 - DNA, 23 bp, synthetic construct
  source 1..23: mol_type = other DNA
ttttaaatgttcaaaaacatttg

SEQ ID NO: 10028 - DNA, 23 bp, synthetic construct
  source 1..23: mol_type = other DNA
tttttaaatgttcaaaaacattt

SEQ ID NO: 10029 - DNA, 23 bp, synthetic construct
  source 1..23: mol_type = other DNA
ctttttaaatgttcaaaaacatt

SEQ ID NO: 10030 - DNA, 23 bp, synthetic construct
  source 1..23: mol_type = other DNA
actttttaaatgttcaaaaacat

SEQ ID NO: 10031 - DNA, 23 bp, synthetic construct
  source 1..23: mol_type = other DNA
aactttttaaatgttcaaaaaca

SEQ ID NO: 10032 - DNA, 23 bp, synthetic construct
  source 1..23: mol_type = other DNA
gaactttttaaatgttcaaaaac

SEQ ID NO: 10033 - DNA, 23 bp, synthetic construct
  source 1..23: mol_type = other DNA
tgaactttttaaatgttcaaaaa

SEQ ID NO: 10034 - DNA, 23 bp, synthetic construct
  source 1..23: mol_type = other DNA
ctgaactttttaaatgttcaaaa

SEQ ID NO: 10035 - DNA, 23 bp, synthetic construct
  source 1..23: mol_type = other DNA
tctgaactttttaaatgttcaaa

SEQ ID NO: 10036 - DNA, 23 bp, synthetic construct
  source 1..23: mol_type = other DNA
atctgaactttttaaatgttcaa

SEQ ID NO: 10037 - DNA, 23 bp, synthetic construct
  source 1..23: mol_type = other DNA
catctgaactttttaaatgttca

SEQ ID NO: 10038 - DNA, 23 bp, synthetic construct
  source 1..23: mol_type = other DNA
acatctgaactttttaaatgttc

SEQ ID NO: 10039 - DNA, 23 bp, synthetic construct
  source 1..23: mol_type = other DNA
aacatctgaactttttaaatgtt

SEQ ID NO: 10040 - DNA, 23 bp, synthetic construct
  source 1..23: mol_type = other DNA
taacatctgaactttttaaatgt

SEQ ID NO: 10041 - DNA, 23 bp, synthetic construct
  source 1..23: mol_type = other DNA
ctaacatctgaactttttaaatg

SEQ ID NO: 10042 - DNA, 23 bp, synthetic construct
  source 1..23: mol_type = other DNA
tctaacatctgaactttttaaat

SEQ ID NO: 10043 - DNA, 23 bp, synthetic construct
  source 1..23: mol_type = other DNA
ttctaacatctgaactttttaaa

SEQ ID NO: 10044 - DNA, 23 bp, synthetic construct
  source 1..23: mol_type = other DNA
tttctaacatctgaactttttaa

SEQ ID NO: 10045 - DNA, 23 bp, synthetic construct
  source 1..23: mol_type = other DNA
ctttctaacatctgaacttttta

SEQ ID NO: 10046 - DNA, 23 bp, synthetic construct
  source 1..23: mol_type = other DNA
actttctaacatctgaacttttt

SEQ ID NO: 10047 - DNA, 23 bp, synthetic construct
  source 1..23: mol_type = other DNA
aactttctaacatctgaactttt

SEQ ID NO: 10048 - DNA, 23 bp, synthetic construct
  source 1..23: mol_type = other DNA
caactttctaacatctgaacttt

SEQ ID NO: 10049 - DNA, 23 bp, synthetic construct
  source 1..23: mol_type = other DNA
tcaactttctaacatctgaactt

SEQ ID NO: 10050 - DNA, 23 bp, synthetic construct
  source 1..23: mol_type = other DNA
ttcaactttctaacatctgaact

SEQ ID NO: 10051 - DNA, 23 bp, synthetic construct
  source 1..23: mol_type = other DNA
tttcaactttctaacatctgaac

SEQ ID NO: 10052 - DNA, 23 bp, synthetic construct
  source 1..23: mol_type = other DNA
ctttcaactttctaacatctgaa

SEQ ID NO: 10053 - DNA, 23 bp, synthetic construct
  source 1..23: mol_type = other DNA
cctttcaactttctaacatctga

SEQ ID NO: 10054 - DNA, 23 bp, synthetic construct
  source 1..23: mol_type = other DNA
acctttcaactttctaacatctg

SEQ ID NO: 10055 - DNA, 23 bp, synthetic construct
  source 1..23: mol_type = other DNA
aacctttcaactttctaacatct

SEQ ID NO: 10056 - DNA, 23 bp, synthetic construct
  source 1..23: mol_type = other DNA
taacctttcaactttctaacatc

SEQ ID NO: 10057 - DNA, 23 bp, synthetic construct
  source 1..23: mol_type = other DNA
ttaacctttcaactttctaacat

SEQ ID NO: 10058 - DNA, 23 bp, synthetic construct
  source 1..23: mol_type = other DNA
attaacctttcaactttctaaca

SEQ ID NO: 10059 - DNA, 23 bp, synthetic construct
  source 1..23: mol_type = other DNA
cattaacctttcaactttctaac

SEQ ID NO: 10060 - DNA, 23 bp, synthetic construct
  source 1..23: mol_type = other DNA
acattaacctttcaactttctaa

SEQ ID NO: 10061 - DNA, 23 bp, synthetic construct
  source 1..23: mol_type = other DNA
tacattaacctttcaactttcta

SEQ ID NO: 10062 - DNA, 23 bp, synthetic construct
  source 1..23: mol_type = other DNA
ttacattaacctttcaactttct

SEQ ID NO: 10063 - DNA, 23 bp, synthetic construct
  source 1..23: mol_type = other DNA
tttacattaacctttcaactttc

SEQ ID NO: 10064 - DNA, 23 bp, synthetic construct
  source 1..23: mol_type = other DNA
ttttacattaacctttcaacttt

SEQ ID NO: 10065 - DNA, 23 bp, synthetic construct
  source 1..23: mol_type = other DNA
gttttacattaacctttcaactt

SEQ ID NO: 10066 - DNA, 23 bp, synthetic construct
  source 1..23: mol_type = other DNA
tgttttacattaacctttcaact

SEQ ID NO: 10067 - DNA, 23 bp, synthetic construct
  source 1..23: mol_type = other DNA
ttgttttacattaacctttcaac

SEQ ID NO: 10068 - DNA, 23 bp, synthetic construct
  source 1..23: mol_type = other DNA
attgttttacattaacctttcaa

SEQ ID NO: 10069 - DNA, 23 bp, synthetic construct
  source 1..23: mol_type = other DNA
gattgttttacattaacctttca

SEQ ID NO: 10070 - DNA, 23 bp, synthetic construct
  source 1..23: mol_type = other DNA
tgattgttttacattaacctttc

SEQ ID NO: 10071 - DNA, 23 bp, synthetic construct
  source 1..23: mol_type = other DNA
ttgattgttttacattaaccttt

SEQ ID NO: 10072 - DNA, 23 bp, synthetic construct
  source 1..23: mol_type = other DNA
attgattgttttacattaacctt

SEQ ID NO: 10073 - DNA, 23 bp, synthetic construct
  source 1..23: mol_type = other DNA
tattgattgttttacattaacct

SEQ ID NO: 10074 - DNA, 23 bp, synthetic construct
  source 1..23: mol_type = other DNA
atattgattgttttacattaacc

SEQ ID NO: 10075 - DNA, 23 bp, synthetic construct
  source 1..23: mol_type = other DNA
aatattgattgttttacattaac

SEQ ID NO: 10076 - DNA, 23 bp, synthetic construct
  source 1..23: mol_type = other DNA
taatattgattgttttacattaa

SEQ ID NO: 10077 - DNA, 23 bp, synthetic construct
  source 1..23: mol_type = other DNA
ttaatattgattgttttacatta

SEQ ID NO: 10078 - DNA, 23 bp, synthetic construct
  source 1..23: mol_type = other DNA
tttaatattgattgttttacatt

SEQ ID NO: 10079 - DNA, 23 bp, synthetic construct
  source 1..23: mol_type = other DNA
ctttaatattgattgttttacat

SEQ ID NO: 10080 - DNA, 23 bp, synthetic construct
  source 1..23: mol_type = other DNA
tctttaatattgattgttttaca

SEQ ID NO: 10081 - DNA, 23 bp, synthetic construct
  source 1..23: mol_type = other DNA
ttctttaatattgattgttttac

SEQ ID NO: 10082 - DNA, 23 bp, synthetic construct
  source 1..23: mol_type = other DNA
attctttaatattgattgtttta

SEQ ID NO: 10083 - DNA, 23 bp, synthetic construct
  source 1..23: mol_type = other DNA
aattctttaatattgattgtttt

SEQ ID NO: 10084 - DNA, 23 bp, synthetic construct
  source 1..23: mol_type = other DNA
aaattctttaatattgattgttt

SEQ ID NO: 10085 - DNA, 23 bp, synthetic construct
  source 1..23: mol_type = other DNA
aaaattctttaatattgattgtt

SEQ ID NO: 10086 - DNA, 23 bp, synthetic construct
  source 1..23: mol_type = other DNA
caaaattctttaatattgattgt

SEQ ID NO: 10087 - DNA, 23 bp, synthetic construct
  source 1..23: mol_type = other DNA
tcaaaattctttaatattgattg

SEQ ID NO: 10088 - DNA, 23 bp, synthetic construct
  source 1..23: mol_type = other DNA
atcaaaattctttaatattgatt

SEQ ID NO: 10089 - DNA, 23 bp, synthetic construct
  source 1..23: mol_type = other DNA
catcaaaattctttaatattgat

SEQ ID NO: 10090 - DNA, 23 bp, synthetic construct
  source 1..23: mol_type = other DNA
gcatcaaaattctttaatattga

SEQ ID NO: 10091 - DNA, 23 bp, synthetic construct
  source 1..23: mol_type = other DNA
ggcatcaaaattctttaatattg

SEQ ID NO: 10092 - DNA, 23 bp, synthetic construct
  source 1..23: mol_type = other DNA
tggcatcaaaattctttaatatt

SEQ ID NO: 10093 - DNA, 23 bp, synthetic construct
  source 1..23: mol_type = other DNA
ttggcatcaaaattctttaatat

SEQ ID NO: 10094 - DNA, 23 bp, synthetic construct
  source 1..23: mol_type = other DNA
tttggcatcaaaattctttaata

SEQ ID NO: 10095 - DNA, 23 bp, synthetic construct
  source 1..23: mol_type = other DNA
ttttggcatcaaaattctttaat

SEQ ID NO: 10096 - DNA, 23 bp, synthetic construct
  source 1..23: mol_type = other DNA
gttttggcatcaaaattctttaa

SEQ ID NO: 10097 - DNA, 23 bp, synthetic construct
  source 1..23: mol_type = other DNA
agttttggcatcaaaattcttta

SEQ ID NO: 10098 - DNA, 23 bp, synthetic construct
  source 1..23: mol_type = other DNA
tagttttggcatcaaaattcttt

SEQ ID NO: 10099 - DNA, 23 bp, synthetic construct
  source 1..23: mol_type = other DNA
atagttttggcatcaaaattctt

SEQ ID NO: 10100 - DNA, 23 bp, synthetic construct
  source 1..23: mol_type = other DNA
aatagttttggcatcaaaattct

SEQ ID NO: 10101 - DNA, 23 bp, synthetic construct
  source 1..23: mol_type = other DNA
taatagttttggcatcaaaattc

SEQ ID NO: 10102 - DNA, 23 bp, synthetic construct
  source 1..23: mol_type = other DNA
ctaatagttttggcatcaaaatt

SEQ ID NO: 10103 - DNA, 23 bp, synthetic construct
  source 1..23: mol_type = other DNA
tctaatagttttggcatcaaaat

SEQ ID NO: 10104 - DNA, 23 bp, synthetic construct
  source 1..23: mol_type = other DNA
atctaatagttttggcatcaaaa

SEQ ID NO: 10105 - DNA, 23 bp, synthetic construct
  source 1..23: mol_type = other DNA
tatctaatagttttggcatcaaa

SEQ ID NO: 10106 - DNA, 23 bp, synthetic construct
  source 1..23: mol_type = other DNA
ttatctaatagttttggcatcaa

SEQ ID NO: 10107 - DNA, 23 bp, synthetic construct
  source 1..23: mol_type = other DNA
tttatctaatagttttggcatca

SEQ ID NO: 10108 - DNA, 23 bp, synthetic construct
  source 1..23: mol_type = other DNA
ttttatctaatagttttggcatc

SEQ ID NO: 10109 - DNA, 23 bp, synthetic construct
  source 1..23: mol_type = other DNA
cttttatctaatagttttggcat

SEQ ID NO: 10110 - DNA, 23 bp, synthetic construct
  source 1..23: mol_type = other DNA
ccttttatctaatagttttggca

SEQ ID NO: 10111 - DNA, 23 bp, synthetic construct
  source 1..23: mol_type = other DNA
accttttatctaatagttttggc

SEQ ID NO: 10112 - DNA, 23 bp, synthetic construct
  source 1..23: mol_type = other DNA
aaccttttatctaatagttttgg

SEQ ID NO: 10113 - DNA, 23 bp, synthetic construct
  source 1..23: mol_type = other DNA
taaccttttatctaatagttttg

SEQ ID NO: 10114 - DNA, 23 bp, synthetic construct
  source 1..23: mol_type = other DNA
ttaaccttttatctaatagtttt

SEQ ID NO: 10115 - DNA, 23 bp, synthetic construct
  source 1..23: mol_type = other DNA
attaaccttttatctaatagttt

SEQ ID NO: 10116 - DNA, 23 bp, synthetic construct
  source 1..23: mol_type = other DNA
gattaaccttttatctaatagtt

SEQ ID NO: 10117 - DNA, 23 bp, synthetic construct
  source 1..23: mol_type = other DNA
agattaaccttttatctaatagt

SEQ ID NO: 10118 - DNA, 23 bp, synthetic construct
  source 1..23: mol_type = other DNA
tagattaaccttttatctaatag

SEQ ID NO: 10119 - DNA, 23 bp, synthetic construct
  source 1..23: mol_type = other DNA
gtagattaaccttttatctaata

SEQ ID NO: 10120 - DNA, 23 bp, synthetic construct
  source 1..23: mol_type = other DNA
tgtagattaaccttttatctaat

SEQ ID NO: 10121 - DNA, 23 bp, synthetic construct
  source 1..23: mol_type = other DNA
atgtagattaaccttttatctaa

SEQ ID NO: 10122 - DNA, 23 bp, synthetic construct
  source 1..23: mol_type = other DNA
gatgtagattaaccttttatcta

SEQ ID NO: 10123 - DNA, 23 bp, synthetic construct
  source 1..23: mol_type = other DNA
ggatgtagattaaccttttatct

SEQ ID NO: 10124 - DNA, 23 bp, synthetic construct
  source 1..23: mol_type = other DNA
gggatgtagattaaccttttatc

SEQ ID NO: 10125 - DNA, 23 bp, synthetic construct
  source 1..23: mol_type = other DNA
agggatgtagattaaccttttat

SEQ ID NO: 10126 - DNA, 23 bp, synthetic construct
  source 1..23: mol_type = other DNA
tagggatgtagattaacctttta

SEQ ID NO: 10127 - DNA, 23 bp, synthetic construct
  source 1..23: mol_type = other DNA
gtagggatgtagattaacctttt

SEQ ID NO: 10128 - DNA, 23 bp, synthetic construct
  source 1..23: mol_type = other DNA
agtagggatgtagattaaccttt

SEQ ID NO: 10129 - DNA, 23 bp, synthetic construct
  source 1..23: mol_type = other DNA
tagtagggatgtagattaacctt

SEQ ID NO: 10130 - DNA, 23 bp, synthetic construct
  source 1..23: mol_type = other DNA
ctagtagggatgtagattaacct

SEQ ID NO: 10131 - DNA, 23 bp, synthetic construct
  source 1..23: mol_type = other DNA
tctagtagggatgtagattaacc

SEQ ID NO: 10132 - DNA, 23 bp, synthetic construct
  source 1..23: mol_type = other DNA
ttctagtagggatgtagattaac

SEQ ID NO: 10133 - DNA, 23 bp, synthetic construct
  source 1..23: mol_type = other DNA
attctagtagggatgtagattaa

SEQ ID NO: 10134 - DNA, 23 bp, synthetic construct
  source 1..23: mol_type = other DNA
aattctagtagggatgtagatta

SEQ ID NO: 10135 - DNA, 23 bp, synthetic construct
  source 1..23: mol_type = other DNA
gaattctagtagggatgtagatt

SEQ ID NO: 10136 - DNA, 23 bp, synthetic construct
  source 1..23: mol_type = other DNA
agaattctagtagggatgtagat

SEQ ID NO: 10137 - DNA, 23 bp, synthetic construct
  source 1..23: mol_type = other DNA
gagaattctagtagggatgtaga

SEQ ID NO: 10138 - DNA, 23 bp, synthetic construct
  source 1..23: mol_type = other DNA
tgagaattctagtagggatgtag

SEQ ID NO: 10139 - DNA, 23 bp, synthetic construct
  source 1..23: mol_type = other DNA
atgagaattctagtagggatgta

SEQ ID NO: 10140 - DNA, 23 bp, synthetic construct
  source 1..23: mol_type = other DNA
tatgagaattctagtagggatgt

SEQ ID NO: 10141 - DNA, 23 bp, synthetic construct
  source 1..23: mol_type = other DNA
gtatgagaattctagtagggatg

SEQ ID NO: 10142 - DNA, 23 bp, Homo sapiens
  source 1..23: mol_type = genomic DNA
ctaataattgttttctttgggat

SEQ ID NO: 10143 - DNA, 23 bp, Homo sapiens
  source 1..23: mol_type = genomic DNA
taataattgttttctttgggata

SEQ ID NO: 10144 - DNA, 23 bp, Homo sapiens
  source 1..23: mol_type = genomic DNA
aataattgttttctttgggataa

SEQ ID NO: 10145 - DNA, 23 bp, Homo sapiens
  source 1..23: mol_type = genomic DNA
ataattgttttctttgggataac

SEQ ID NO: 10146 - DNA, 23 bp, Homo sapiens
  source 1..23: mol_type = genomic DNA
taattgttttctttgggataact

SEQ ID NO: 10147 - DNA, 23 bp, Homo sapiens
  source 1..23: mol_type = genomic DNA
aattgttttctttgggataactt

SEQ ID NO: 10148 - DNA, 23 bp, Homo sapiens
  source 1..23: mol_type = genomic DNA
attgttttctttgggataacttt

SEQ ID NO: 10149 - DNA, 23 bp, Homo sapiens
  source 1..23: mol_type = genomic DNA
ttgttttctttgggataactttt

SEQ ID NO: 10150 - DNA, 23 bp, Homo sapiens
  source 1..23: mol_type = genomic DNA
tgttttctttgggataactttta

SEQ ID NO: 10151 - DNA, 23 bp, Homo sapiens
  source 1..23: mol_type = genomic DNA
gttttctttgggataacttttaa

SEQ ID NO: 10152 - DNA, 23 bp, Homo sapiens
  source 1..23: mol_type = genomic DNA
ttttctttgggataacttttaaa

SEQ ID NO: 10153 - DNA, 23 bp, Homo sapiens
  source 1..23: mol_type = genomic DNA
tttctttgggataacttttaaag

SEQ ID NO: 10154 - DNA, 23 bp, Homo sapiens
  source 1..23: mol_type = genomic DNA
ttctttgggataacttttaaagt

SEQ ID NO: 10155 - DNA, 23 bp, Homo sapiens
  source 1..23: mol_type = genomic DNA
tctttgggataacttttaaagta

SEQ ID NO: 10156 - DNA, 23 bp, Homo sapiens
  source 1..23: mol_type = genomic DNA
ctttgggataacttttaaagtac

SEQ ID NO: 10157 - DNA, 23 bp, Homo sapiens
  source 1..23: mol_type = genomic DNA
tttgggataacttttaaagtaca

SEQ ID NO: 10158 - DNA, 23 bp, Homo sapiens
  source 1..23: mol_type = genomic DNA
ttgggataacttttaaagtacat

SEQ ID NO: 10159 - DNA, 23 bp, Homo sapiens
  source 1..23: mol_type = genomic DNA
tgggataacttttaaagtacatt

SEQ ID NO: 10160 - DNA, 23 bp, Homo sapiens
  source 1..23: mol_type = genomic DNA
gggataacttttaaagtacatta

SEQ ID NO: 10161 - DNA, 23 bp, Homo sapiens
  source 1..23: mol_type = genomic DNA
ggataacttttaaagtacattaa

SEQ ID NO: 10162 - DNA, 23 bp, Homo sapiens
  source 1..23: mol_type = genomic DNA
gataacttttaaagtacattaaa

SEQ ID NO: 10163 - DNA, 23 bp, Homo sapiens
  source 1..23: mol_type = genomic DNA
ataacttttaaagtacattaaaa

SEQ ID NO: 10164 - DNA, 23 bp, Homo sapiens
  source 1..23: mol_type = genomic DNA
taacttttaaagtacattaaaag

SEQ ID NO: 10165 - DNA, 23 bp, Homo sapiens
  source 1..23: mol_type = genomic DNA
aacttttaaagtacattaaaaga

SEQ ID NO: 10166 - DNA, 23 bp, Homo sapiens
  source 1..23: mol_type = genomic DNA
acttttaaagtacattaaaagac

SEQ ID NO: 10167 - DNA, 23 bp, Homo sapiens
  source 1..23: mol_type = genomic DNA
cttttaaagtacattaaaagact

SEQ ID NO: 10168 - DNA, 23 bp, Homo sapiens
  source 1..23: mol_type = genomic DNA
ttttaaagtacattaaaagacta

SEQ ID NO: 10169 - DNA, 23 bp, Homo sapiens
  source 1..23: mol_type = genomic DNA
tttaaagtacattaaaagactat

SEQ ID NO: 10170 - DNA, 23 bp, Homo sapiens
  source 1..23: mol_type = genomic DNA
ttaaagtacattaaaagactatc

SEQ ID NO: 10171 - DNA, 23 bp, Homo sapiens
  source 1..23: mol_type = genomic DNA
taaagtacattaaaagactatca

SEQ ID NO: 10172 - DNA, 23 bp, Homo sapiens
  source 1..23: mol_type = genomic DNA
aaagtacattaaaagactatcaa

SEQ ID NO: 10173 - DNA, 23 bp, Homo sapiens
  source 1..23: mol_type = genomic DNA
aagtacattaaaagactatcaac

SEQ ID NO: 10174 - DNA, 23 bp, Homo sapiens
  source 1..23: mol_type = genomic DNA
agtacattaaaagactatcaact

SEQ ID NO: 10175 - DNA, 23 bp, Homo sapiens
  source 1..23: mol_type = genomic DNA
gtacattaaaagactatcaactt

SEQ ID NO: 10176 - DNA, 23 bp, Homo sapiens
  source 1..23: mol_type = genomic DNA
tacattaaaagactatcaactta

SEQ ID NO: 10177 - DNA, 23 bp, Homo sapiens
  source 1..23: mol_type = genomic DNA
acattaaaagactatcaacttaa

SEQ ID NO: 10178 - DNA, 23 bp, Homo sapiens
  source 1..23: mol_type = genomic DNA
cattaaaagactatcaacttaat

SEQ ID NO: 10179 - DNA, 23 bp, Homo sapiens
  source 1..23: mol_type = genomic DNA
attaaaagactatcaacttaatt

SEQ ID NO: 10180 - DNA, 23 bp, Homo sapiens
  source 1..23: mol_type = genomic DNA
ttaaaagactatcaacttaattt

SEQ ID NO: 10181 - DNA, 23 bp, Homo sapiens
  source 1..23: mol_type = genomic DNA
taaaagactatcaacttaatttc

SEQ ID NO: 10182 - DNA, 23 bp, Homo sapiens
  source 1..23: mol_type = genomic DNA
aaaagactatcaacttaatttct

SEQ ID NO: 10183 - DNA, 23 bp, Homo sapiens
  source 1..23: mol_type = genomic DNA
aaagactatcaacttaatttctg

SEQ ID NO: 10184 - DNA, 23 bp, Homo sapiens
  source 1..23: mol_type = genomic DNA
aagactatcaacttaatttctga

SEQ ID NO: 10185 - DNA, 23 bp, Homo sapiens
  source 1..23: mol_type = genomic DNA
agactatcaacttaatttctgat

SEQ ID NO: 10186 - DNA, 23 bp, Homo sapiens
  source 1..23: mol_type = genomic DNA
gactatcaacttaatttctgatc

SEQ ID NO: 10187 - DNA, 23 bp, Homo sapiens
  source 1..23: mol_type = genomic DNA
actatcaacttaatttctgatca

SEQ ID NO: 10188 - DNA, 23 bp, Homo sapiens
  source 1..23: mol_type = genomic DNA
ctatcaacttaatttctgatcat

SEQ ID NO: 10189 - DNA, 23 bp, Homo sapiens
  source 1..23: mol_type = genomic DNA
tatcaacttaatttctgatcata

SEQ ID NO: 10190 - DNA, 23 bp, Homo sapiens
  source 1..23: mol_type = genomic DNA
atcaacttaatttctgatcatat

SEQ ID NO: 10191 - DNA, 23 bp, Homo sapiens
  source 1..23: mol_type = genomic DNA
tcaacttaatttctgatcatatt

SEQ ID NO: 10192 - DNA, 23 bp, Homo sapiens
  source 1..23: mol_type = genomic DNA
caacttaatttctgatcatattt

SEQ ID NO: 10193 - DNA, 23 bp, Homo sapiens
  source 1..23: mol_type = genomic DNA
aacttaatttctgatcatatttt

SEQ ID NO: 10194 - DNA, 23 bp, Homo sapiens
  source 1..23: mol_type = genomic DNA
acttaatttctgatcatattttg

SEQ ID NO: 10195 - DNA, 23 bp, Homo sapiens
  source 1..23: mol_type = genomic DNA
cttaatttctgatcatattttgt

SEQ ID NO: 10196 - DNA, 23 bp, Homo sapiens
  source 1..23: mol_type = genomic DNA
ttaatttctgatcatattttgtt

SEQ ID NO: 10197 - DNA, 23 bp, Homo sapiens
  source 1..23: mol_type = genomic DNA
taatttctgatcatattttgttg

SEQ ID NO: 10198 - DNA, 23 bp, Homo sapiens
  source 1..23: mol_type = genomic DNA
aatttctgatcatattttgttga

SEQ ID NO: 10199 - DNA, 23 bp, Homo sapiens
  source 1..23: mol_type = genomic DNA
atttctgatcatattttgttgaa

SEQ ID NO: 10200 - DNA, 23 bp, Homo sapiens
  source 1..23: mol_type = genomic DNA
tttctgatcatattttgttgaat

SEQ ID NO: 10201 - DNA, 23 bp, Homo sapiens
  source 1..23: mol_type = genomic DNA
ttctgatcatattttgttgaata

SEQ ID NO: 10202 - DNA, 23 bp, Homo sapiens
  source 1..23: mol_type = genomic DNA
tctgatcatattttgttgaataa

SEQ ID NO: 10203 - DNA, 23 bp, Homo sapiens
  source 1..23: mol_type = genomic DNA
ctgatcatattttgttgaataaa

SEQ ID NO: 10204 - DNA, 23 bp, Homo sapiens
  source 1..23: mol_type = genomic DNA
tgatcatattttgttgaataaaa

SEQ ID NO: 10205 - DNA, 23 bp, Homo sapiens
  source 1..23: mol_type = genomic DNA
gatcatattttgttgaataaaat

SEQ ID NO: 10206 - DNA, 23 bp, Homo sapiens
  source 1..23: mol_type = genomic DNA
atcatattttgttgaataaaata

SEQ ID NO: 10207 - DNA, 23 bp, Homo sapiens
  source 1..23: mol_type = genomic DNA
tcatattttgttgaataaaataa

SEQ ID NO: 10208 - DNA, 23 bp, Homo sapiens
  source 1..23: mol_type = genomic DNA
catattttgttgaataaaataag

SEQ ID NO: 10209 - DNA, 23 bp, Homo sapiens
  source 1..23: mol_type = genomic DNA
atattttgttgaataaaataagt

SEQ ID NO: 10210 - DNA, 23 bp, Homo sapiens
  source 1..23: mol_type = genomic DNA
tattttgttgaataaaataagta

SEQ ID NO: 10211 - DNA, 23 bp, Homo sapiens
  source 1..23: mol_type = genomic DNA
attttgttgaataaaataagtaa

SEQ ID NO: 10212 - DNA, 23 bp, Homo sapiens
  source 1..23: mol_type = genomic DNA
ttttgttgaataaaataagtaaa

SEQ ID NO: 10213 - DNA, 23 bp, Homo sapiens
  source 1..23: mol_type = genomic DNA
tttgttgaataaaataagtaaaa

SEQ ID NO: 10214 - DNA, 23 bp, Homo sapiens
  source 1..23: mol_type = genomic DNA
ttgttgaataaaataagtaaaat

SEQ ID NO: 10215 - DNA, 23 bp, Homo sapiens
  source 1..23: mol_type = genomic DNA
tgttgaataaaataagtaaaatg

SEQ ID NO: 10216 - DNA, 23 bp, Homo sapiens
  source 1..23: mol_type = genomic DNA
gttgaataaaataagtaaaatgt

SEQ ID NO: 10217 - DNA, 23 bp, Homo sapiens
  source 1..23: mol_type = genomic DNA
ttgaataaaataagtaaaatgtc

SEQ ID NO: 10218 - DNA, 23 bp, Homo sapiens
  source 1..23: mol_type = genomic DNA
tgaataaaataagtaaaatgtct

SEQ ID NO: 10219 - DNA, 23 bp, Homo sapiens
  source 1..23: mol_type = genomic DNA
gaataaaataagtaaaatgtctt

SEQ ID NO: 10220 - DNA, 23 bp, Homo sapiens
  source 1..23: mol_type = genomic DNA
aataaaataagtaaaatgtcttg

SEQ ID NO: 10221 - DNA, 23 bp, Homo sapiens
  source 1..23: mol_type = genomic DNA
ataaaataagtaaaatgtcttgt

SEQ ID NO: 10222 - DNA, 23 bp, Homo sapiens
  source 1..23: mol_type = genomic DNA
taaaataagtaaaatgtcttgtg

SEQ ID NO: 10223 - DNA, 23 bp, Homo sapiens
  source 1..23: mol_type = genomic DNA
aaaataagtaaaatgtcttgtga

SEQ ID NO: 10224 - DNA, 23 bp, Homo sapiens
  source 1..23: mol_type = genomic DNA
aaataagtaaaatgtcttgtgaa

SEQ ID NO: 10225 - DNA, 23 bp, Homo sapiens
  source 1..23: mol_type = genomic DNA
aataagtaaaatgtcttgtgaaa

SEQ ID NO: 10226 - DNA, 23 bp, Homo sapiens
  source 1..23: mol_type = genomic DNA
ataagtaaaatgtcttgtgaaac

SEQ ID NO: 10227 - DNA, 23 bp, Homo sapiens
  source 1..23: mol_type = genomic DNA
taagtaaaatgtcttgtgaaaca

SEQ ID NO: 10228 - DNA, 23 bp, Homo sapiens
  source 1..23: mol_type = genomic DNA
aagtaaaatgtcttgtgaaacaa

SEQ ID NO: 10229 - DNA, 23 bp, Homo sapiens
  source 1..23: mol_type = genomic DNA
agtaaaatgtcttgtgaaacaaa

SEQ ID NO: 10230 - DNA, 23 bp, Homo sapiens
  source 1..23: mol_type = genomic DNA
gtaaaatgtcttgtgaaacaaaa

SEQ ID NO: 10231 - DNA, 23 bp, Homo sapiens
  source 1..23: mol_type = genomic DNA
taaaatgtcttgtgaaacaaaat

SEQ ID NO: 10232 - DNA, 23 bp, Homo sapiens
  source 1..23: mol_type = genomic DNA
aaaatgtcttgtgaaacaaaatg

SEQ ID NO: 10233 - DNA, 23 bp, Homo sapiens
  source 1..23: mol_type = genomic DNA
aaatgtcttgtgaaacaaaatgc

SEQ ID NO: 10234 - DNA, 23 bp, Homo sapiens
  source 1..23: mol_type = genomic DNA
aatgtcttgtgaaacaaaatgct

SEQ ID NO: 10235 - DNA, 23 bp, Homo sapiens
  source 1..23: mol_type = genomic DNA
atgtcttgtgaaacaaaatgctt

SEQ ID NO: 10236 - DNA, 23 bp, Homo sapiens
  source 1..23: mol_type = genomic DNA
tgtcttgtgaaacaaaatgcttt

SEQ ID NO: 10237 - DNA, 23 bp, Homo sapiens
  source 1..23: mol_type = genomic DNA
gtcttgtgaaacaaaatgctttt

SEQ ID NO: 10238 - DNA, 23 bp, Homo sapiens
  source 1..23: mol_type = genomic DNA
tcttgtgaaacaaaatgcttttt

SEQ ID NO: 10239 - DNA, 23 bp, Homo sapiens
  source 1..23: mol_type = genomic DNA
cttgtgaaacaaaatgcttttta

SEQ ID NO: 10240 - DNA, 23 bp, Homo sapiens
  source 1..23: mol_type = genomic DNA
ttgtgaaacaaaatgctttttaa

SEQ ID NO: 10241 - DNA, 23 bp, Homo sapiens
  source 1..23: mol_type = genomic DNA
tgtgaaacaaaatgctttttaac

SEQ ID NO: 10242 - DNA, 23 bp, Homo sapiens
  source 1..23: mol_type = genomic DNA
gtgaaacaaaatgctttttaaca

SEQ ID NO: 10243 - DNA, 23 bp, Homo sapiens
  source 1..23: mol_type = genomic DNA
tgaaacaaaatgctttttaacat

SEQ ID NO: 10244 - DNA, 23 bp, Homo sapiens
  source 1..23: mol_type = genomic DNA
gaaacaaaatgctttttaacatc

SEQ ID NO: 10245 - DNA, 23 bp, Homo sapiens
  source 1..23: mol_type = genomic DNA
aaacaaaatgctttttaacatcc

SEQ ID NO: 10246 - DNA, 23 bp, Homo sapiens
  source 1..23: mol_type = genomic DNA
aacaaaatgctttttaacatcca

SEQ ID NO: 10247 - DNA, 23 bp, Homo sapiens
  source 1..23: mol_type = genomic DNA
acaaaatgctttttaacatccat

SEQ ID NO: 10248 - DNA, 23 bp, Homo sapiens
  source 1..23: mol_type = genomic DNA
caaaatgctttttaacatccata

SEQ ID NO: 10249 - DNA, 23 bp, Homo sapiens
  source 1..23: mol_type = genomic DNA
aaaatgctttttaacatccatat

SEQ ID NO: 10250 - DNA, 23 bp, Homo sapiens
  source 1..23: mol_type = genomic DNA
aaatgctttttaacatccatata

SEQ ID NO: 10251 - DNA, 23 bp, Homo sapiens
  source 1..23: mol_type = genomic DNA
aatgctttttaacatccatataa

SEQ ID NO: 10252 - DNA, 23 bp, Homo sapiens
  source 1..23: mol_type = genomic DNA
atgctttttaacatccatataaa

SEQ ID NO: 10253 - DNA, 23 bp, Homo sapiens
  source 1..23: mol_type = genomic DNA
tgctttttaacatccatataaag

SEQ ID NO: 10254 - DNA, 23 bp, Homo sapiens
  source 1..23: mol_type = genomic DNA
gctttttaacatccatataaagc

SEQ ID NO: 10255 - DNA, 23 bp, Homo sapiens
  source 1..23: mol_type = genomic DNA
ctttttaacatccatataaagct

SEQ ID NO: 10256 - DNA, 23 bp, Homo sapiens
  source 1..23: mol_type = genomic DNA
tttttaacatccatataaagcta

SEQ ID NO: 10257 - DNA, 23 bp, Homo sapiens
  source 1..23: mol_type = genomic DNA
ttttaacatccatataaagctat

SEQ ID NO: 10258 - DNA, 23 bp, Homo sapiens
  source 1..23: mol_type = genomic DNA
tttaacatccatataaagctatc

SEQ ID NO: 10259 - DNA, 23 bp, Homo sapiens
  source 1..23: mol_type = genomic DNA
ttaacatccatataaagctatct

SEQ ID NO: 10260 - DNA, 23 bp, Homo sapiens
  source 1..23: mol_type = genomic DNA
taacatccatataaagctatcta

SEQ ID NO: 10261 - DNA, 23 bp, Homo sapiens
  source 1..23: mol_type = genomic DNA
aacatccatataaagctatctat

SEQ ID NO: 10262 - DNA, 23 bp, Homo sapiens
  source 1..23: mol_type = genomic DNA
acatccatataaagctatctata

SEQ ID NO: 10263 - DNA, 23 bp, Homo sapiens
  source 1..23: mol_type = genomic DNA
catccatataaagctatctatat

SEQ ID NO: 10264 - DNA, 23 bp, Homo sapiens
  source 1..23: mol_type = genomic DNA
atccatataaagctatctatata

SEQ ID NO: 10265 - DNA, 23 bp, Homo sapiens
  source 1..23: mol_type = genomic DNA
tccatataaagctatctatatat

SEQ ID NO: 10266 - DNA, 23 bp, Homo sapiens
  source 1..23: mol_type = genomic DNA
ccatataaagctatctatatata

SEQ ID NO: 10267 - DNA, 23 bp, Homo sapiens
  source 1..23: mol_type = genomic DNA
catataaagctatctatatatag

SEQ ID NO: 10268 - DNA, 23 bp, Homo sapiens
  source 1..23: mol_type = genomic DNA
atataaagctatctatatatagc

SEQ ID NO: 10269 - DNA, 23 bp, Homo sapiens
  source 1..23: mol_type = genomic DNA
tataaagctatctatatatagct

SEQ ID NO: 10270 - DNA, 23 bp, Homo sapiens
  source 1..23: mol_type = genomic DNA
ataaagctatctatatatagcta

SEQ ID NO: 10271 - DNA, 23 bp, Homo sapiens
  source 1..23: mol_type = genomic DNA
taaagctatctatatatagctat

SEQ ID NO: 10272 - DNA, 23 bp, Homo sapiens
  source 1..23: mol_type = genomic DNA
aaagctatctatatatagctatc

SEQ ID NO: 10273 - DNA, 23 bp, Homo sapiens
  source 1..23: mol_type = genomic DNA
aagctatctatatatagctatct

SEQ ID NO: 10274 - DNA, 23 bp, Homo sapiens
  source 1..23: mol_type = genomic DNA
agctatctatatatagctatcta

SEQ ID NO: 10275 - DNA, 23 bp, Homo sapiens
  source 1..23: mol_type = genomic DNA
gctatctatatatagctatctat

SEQ ID NO: 10276 - DNA, 23 bp, Homo sapiens
  source 1..23: mol_type = genomic DNA
ctatctatatatagctatctata

SEQ ID NO: 10277 - DNA, 23 bp, Homo sapiens
  source 1..23: mol_type = genomic DNA
tatctatatatagctatctatat

SEQ ID NO: 10278 - DNA, 23 bp, Homo sapiens
  source 1..23: mol_type = genomic DNA
atctatatatagctatctatatc

SEQ ID NO: 10279 - DNA, 23 bp, Homo sapiens
  source 1..23: mol_type = genomic DNA
tctatatatagctatctatatct

SEQ ID NO: 10280 - DNA, 23 bp, Homo sapiens
  source 1..23: mol_type = genomic DNA
ctatatatagctatctatatcta

SEQ ID NO: 10281 - DNA, 23 bp, Homo sapiens
  source 1..23: mol_type = genomic DNA
tatatatagctatctatatctat

SEQ ID NO: 10282 - DNA, 23 bp, Homo sapiens
  source 1..23: mol_type = genomic DNA
atatatagctatctatatctata

SEQ ID NO: 10283 - DNA, 23 bp, Homo sapiens
  source 1..23: mol_type = genomic DNA
tatatagctatctatatctatat

SEQ ID NO: 10284 - DNA, 23 bp, Homo sapiens
  source 1..23: mol_type = genomic DNA
atatagctatctatatctatata

SEQ ID NO: 10285 - DNA, 23 bp, Homo sapiens
  source 1..23: mol_type = genomic DNA
tatagctatctatatctatatag

SEQ ID NO: 10286 - DNA, 23 bp, Homo sapiens
  source 1..23: mol_type = genomic DNA
atagctatctatatctatatagc

SEQ ID NO: 10287 - DNA, 23 bp, Homo sapiens
  source 1..23: mol_type = genomic DNA
tagctatctatatctatatagct

SEQ ID NO: 10288 - DNA, 23 bp, Homo sapiens
  source 1..23: mol_type = genomic DNA
agctatctatatctatatagcta

SEQ ID NO: 10289 - DNA, 23 bp, Homo sapiens
  source 1..23: mol_type = genomic DNA
gctatctatatctatatagctat

SEQ ID NO: 10290 - DNA, 23 bp, Homo sapiens
  source 1..23: mol_type = genomic DNA
ctatctatatctatatagctatt

SEQ ID NO: 10291 - DNA, 23 bp, Homo sapiens
  source 1..23: mol_type = genomic DNA
tatctatatctatatagctattt

SEQ ID NO: 10292 - DNA, 23 bp, Homo sapiens
  source 1..23: mol_type = genomic DNA
atctatatctatatagctatttt

SEQ ID NO: 10293 - DNA, 23 bp, Homo sapiens
  source 1..23: mol_type = genomic DNA
tctatatctatatagctattttt

SEQ ID NO: 10294 - DNA, 23 bp, Homo sapiens
  source 1..23: mol_type = genomic DNA
ctatatctatatagctatttttt

SEQ ID NO: 10295 - DNA, 23 bp, Homo sapiens
  source 1..23: mol_type = genomic DNA
tatatctatatagctattttttt

SEQ ID NO: 10296 - DNA, 23 bp, Homo sapiens
  source 1..23: mol_type = genomic DNA
atatctatatagctatttttttt

SEQ ID NO: 10297 - DNA, 23 bp, Homo sapiens
  source 1..23: mol_type = genomic DNA
tatctatatagctatttttttta

SEQ ID NO: 10298 - DNA, 23 bp, Homo sapiens
  source 1..23: mol_type = genomic DNA
atctatatagctattttttttaa

SEQ ID NO: 10299 - DNA, 23 bp, Homo sapiens
  source 1..23: mol_type = genomic DNA
tctatatagctattttttttaac

SEQ ID NO: 10300 - DNA, 23 bp, Homo sapiens
  source 1..23: mol_type = genomic DNA
ctatatagctattttttttaact

SEQ ID NO: 10301 - DNA, 23 bp, Homo sapiens
  source 1..23: mol_type = genomic DNA
tatatagctattttttttaactt

SEQ ID NO: 10302 - DNA, 23 bp, Homo sapiens
  source 1..23: mol_type = genomic DNA
atatagctattttttttaacttc

SEQ ID NO: 10303 - DNA, 23 bp, Homo sapiens
  source 1..23: mol_type = genomic DNA
tatagctattttttttaacttcc

SEQ ID NO: 10304 - DNA, 23 bp, Homo sapiens
  source 1..23: mol_type = genomic DNA
atagctattttttttaacttcct

SEQ ID NO: 10305 - DNA, 23 bp, Homo sapiens
  source 1..23: mol_type = genomic DNA
tagctattttttttaacttcctt

SEQ ID NO: 10306 - DNA, 23 bp, Homo sapiens
  source 1..23: mol_type = genomic DNA
agctattttttttaacttccttt

SEQ ID NO: 10307 - DNA, 23 bp, Homo sapiens
  source 1..23: mol_type = genomic DNA
gctattttttttaacttccttta

SEQ ID NO: 10308 - DNA, 23 bp, Homo sapiens
  source 1..23: mol_type = genomic DNA
ctattttttttaacttcctttat

SEQ ID NO: 10309 - DNA, 23 bp, Homo sapiens
  source 1..23: mol_type = genomic DNA
tattttttttaacttcctttatt

SEQ ID NO: 10310 - DNA, 23 bp, Homo sapiens
  source 1..23: mol_type = genomic DNA
attttttttaacttcctttattt

SEQ ID NO: 10311 - DNA, 23 bp, Homo sapiens
  source 1..23: mol_type = genomic DNA
ttttttttaacttcctttatttt

SEQ ID NO: 10312 - DNA, 23 bp, Homo sapiens
  source 1..23: mol_type = genomic DNA
tttttttaacttcctttattttc

SEQ ID NO: 10313 - DNA, 23 bp, Homo sapiens
  source 1..23: mol_type = genomic DNA
ttttttaacttcctttattttcc

SEQ ID NO: 10314 - DNA, 23 bp, Homo sapiens
  source 1..23: mol_type = genomic DNA
tttttaacttcctttattttcct

SEQ ID NO: 10315 - DNA, 23 bp, Homo sapiens
  source 1..23: mol_type = genomic DNA
ttttaacttcctttattttcctt

SEQ ID NO: 10316 - DNA, 23 bp, Homo sapiens
  source 1..23: mol_type = genomic DNA
tttaacttcctttattttcctta

SEQ ID NO: 10317 - DNA, 23 bp, Homo sapiens
  source 1..23: mol_type = genomic DNA
ttaacttcctttattttccttac

SEQ ID NO: 10318 - DNA, 23 bp, Homo sapiens
  source 1..23: mol_type = genomic DNA
taacttcctttattttccttaca

SEQ ID NO: 10319 - DNA, 23 bp, Homo sapiens
  source 1..23: mol_type = genomic DNA
aacttcctttattttccttacag

SEQ ID NO: 10320 - DNA, 23 bp, Homo sapiens
  source 1..23: mol_type = genomic DNA
acttcctttattttccttacagg

SEQ ID NO: 10321 - DNA, 23 bp, Homo sapiens
  source 1..23: mol_type = genomic DNA
cttcctttattttccttacaggg

SEQ ID NO: 10322 - DNA, 23 bp, Homo sapiens
  source 1..23: mol_type = genomic DNA
ttcctttattttccttacagggt

SEQ ID NO: 10323 - DNA, 23 bp, Homo sapiens
  source 1..23: mol_type = genomic DNA
tcctttattttccttacagggtt

SEQ ID NO: 10324 - DNA, 23 bp, Homo sapiens
  source 1..23: mol_type = genomic DNA
cctttattttccttacagggttt

SEQ ID NO: 10325 - DNA, 23 bp, Homo sapiens
  source 1..23: mol_type = genomic DNA
ctttattttccttacagggtttt

SEQ ID NO: 10326 - DNA, 23 bp, Homo sapiens
  source 1..23: mol_type = genomic DNA
tttattttccttacagggtttta

SEQ ID NO: 10327 - DNA, 23 bp, Homo sapiens
  source 1..23: mol_type = genomic DNA
ttattttccttacagggttttag

SEQ ID NO: 10328 - DNA, 23 bp, Homo sapiens
  source 1..23: mol_type = genomic DNA
tattttccttacagggttttaga

SEQ ID NO: 10329 - DNA, 23 bp, Homo sapiens
  source 1..23: mol_type = genomic DNA
attttccttacagggttttagac

SEQ ID NO: 10330 - DNA, 23 bp, Homo sapiens
  source 1..23: mol_type = genomic DNA
ttttccttacagggttttagaca

SEQ ID NO: 10331 - DNA, 23 bp, Homo sapiens
  source 1..23: mol_type = genomic DNA
tttccttacagggttttagacaa

SEQ ID NO: 10332 - DNA, 23 bp, Homo sapiens
  source 1..23: mol_type = genomic DNA
ttccttacagggttttagacaaa

SEQ ID NO: 10333 - DNA, 23 bp, Homo sapiens
  source 1..23: mol_type = genomic DNA
tccttacagggttttagacaaaa

SEQ ID NO: 10334 - DNA, 23 bp, Homo sapiens
  source 1..23: mol_type = genomic DNA
ccttacagggttttagacaaaat

SEQ ID NO: 10335 - DNA, 23 bp, Homo sapiens
  source 1..23: mol_type = genomic DNA
cttacagggttttagacaaaatc

SEQ ID NO: 10336 - DNA, 23 bp, Homo sapiens
  source 1..23: mol_type = genomic DNA
ttacagggttttagacaaaatca

SEQ ID NO: 10337 - DNA, 23 bp, Homo sapiens
  source 1..23: mol_type = genomic DNA
tacagggttttagacaaaatcaa

SEQ ID NO: 10338 - DNA, 23 bp, Homo sapiens
  source 1..23: mol_type = genomic DNA
acagggttttagacaaaatcaaa

SEQ ID NO: 10339 - DNA, 23 bp, Homo sapiens
  source 1..23: mol_type = genomic DNA
cagggttttagacaaaatcaaaa

SEQ ID NO: 10340 - DNA, 23 bp, Homo sapiens
  source 1..23: mol_type = genomic DNA
agggttttagacaaaatcaaaaa

SEQ ID NO: 10341 - DNA, 23 bp, Homo sapiens
  source 1..23: mol_type = genomic DNA
gggttttagacaaaatcaaaaag

SEQ ID NO: 10342 - DNA, 23 bp, Homo sapiens
  source 1..23: mol_type = genomic DNA
ggttttagacaaaatcaaaaaga

SEQ ID NO: 10343 - DNA, 23 bp, Homo sapiens
  source 1..23: mol_type = genomic DNA
gttttagacaaaatcaaaaagaa

SEQ ID NO: 10344 - DNA, 23 bp, Homo sapiens
  source 1..23: mol_type = genomic DNA
ttttagacaaaatcaaaaagaag

SEQ ID NO: 10345 - DNA, 23 bp, Homo sapiens
  source 1..23: mol_type = genomic DNA
tttagacaaaatcaaaaagaagg

SEQ ID NO: 10346 - DNA, 23 bp, Homo sapiens
  source 1..23: mol_type = genomic DNA
ttagacaaaatcaaaaagaagga

SEQ ID NO: 10347 - DNA, 23 bp, Homo sapiens
  source 1..23: mol_type = genomic DNA
tagacaaaatcaaaaagaaggaa

SEQ ID NO: 10348 - DNA, 23 bp, Homo sapiens
  source 1..23: mol_type = genomic DNA
agacaaaatcaaaaagaaggaag

SEQ ID NO: 10349 - DNA, 23 bp, Homo sapiens
  source 1..23: mol_type = genomic DNA
gacaaaatcaaaaagaaggaagg

SEQ ID NO: 10350 - DNA, 23 bp, Homo sapiens
  source 1..23: mol_type = genomic DNA
acaaaatcaaaaagaaggaaggt

SEQ ID NO: 10351 - DNA, 23 bp, Homo sapiens
  source 1..23: mol_type = genomic DNA
caaaatcaaaaagaaggaaggtg

SEQ ID NO: 10352 - DNA, 23 bp, Homo sapiens
  source 1..23: mol_type = genomic DNA
aaaatcaaaaagaaggaaggtgc

SEQ ID NO: 10353 - DNA, 23 bp, Homo sapiens
  source 1..23: mol_type = genomic DNA
aaatcaaaaagaaggaaggtgct

SEQ ID NO: 10354 - DNA, 23 bp, Homo sapiens
  source 1..23: mol_type = genomic DNA
aatcaaaaagaaggaaggtgctc

SEQ ID NO: 10355 - DNA, 23 bp, Homo sapiens
  source 1..23: mol_type = genomic DNA
atcaaaaagaaggaaggtgctca

SEQ ID NO: 10356 - DNA, 23 bp, Homo sapiens
  source 1..23: mol_type = genomic DNA
tcaaaaagaaggaaggtgctcac

SEQ ID NO: 10357 - DNA, 23 bp, Homo sapiens
  source 1..23: mol_type = genomic DNA
caaaaagaaggaaggtgctcaca

SEQ ID NO: 10358 - DNA, 23 bp, Homo sapiens
  source 1..23: mol_type = genomic DNA
aaaaagaaggaaggtgctcacat

SEQ ID NO: 10359 - DNA, 23 bp, Homo sapiens
  source 1..23: mol_type = genomic DNA
aaaagaaggaaggtgctcacatt

SEQ ID NO: 10360 - DNA, 23 bp, Homo sapiens
  source 1..23: mol_type = genomic DNA
aaagaaggaaggtgctcacattc

SEQ ID NO: 10361 - DNA, 23 bp, Homo sapiens
  source 1..23: mol_type = genomic DNA
aagaaggaaggtgctcacattcc

SEQ ID NO: 10362 - DNA, 23 bp, Homo sapiens
  source 1..23: mol_type = genomic DNA
agaaggaaggtgctcacattcct

SEQ ID NO: 10363 - DNA, 23 bp, Homo sapiens
  source 1..23: mol_type = genomic DNA
gaaggaaggtgctcacattcctt

SEQ ID NO: 10364 - DNA, 23 bp, Homo sapiens
  source 1..23: mol_type = genomic DNA
aaggaaggtgctcacattcctta

SEQ ID NO: 10365 - DNA, 23 bp, Homo sapiens
  source 1..23: mol_type = genomic DNA
aggaaggtgctcacattccttaa

SEQ ID NO: 10366 - DNA, 23 bp, Homo sapiens
  source 1..23: mol_type = genomic DNA
ggaaggtgctcacattccttaaa

SEQ ID NO: 10367 - DNA, 23 bp, Homo sapiens
  source 1..23: mol_type = genomic DNA
gaaggtgctcacattccttaaat

SEQ ID NO: 10368 - DNA, 23 bp, Homo sapiens
  source 1..23: mol_type = genomic DNA
aaggtgctcacattccttaaatt

SEQ ID NO: 10369 - DNA, 23 bp, Homo sapiens
  source 1..23: mol_type = genomic DNA
aggtgctcacattccttaaatta

SEQ ID NO: 10370 - DNA, 23 bp, Homo sapiens
  source 1..23: mol_type = genomic DNA
ggtgctcacattccttaaattaa

SEQ ID NO: 10371 - DNA, 23 bp, Homo sapiens
  source 1..23: mol_type = genomic DNA
gtgctcacattccttaaattaag

SEQ ID NO: 10372 - DNA, 23 bp, Homo sapiens
  source 1..23: mol_type = genomic DNA
tgctcacattccttaaattaagg

SEQ ID NO: 10373 - DNA, 23 bp, Homo sapiens
  source 1..23: mol_type = genomic DNA
gctcacattccttaaattaagga

SEQ ID NO: 10374 - DNA, 23 bp, Homo sapiens
  source 1..23: mol_type = genomic DNA
ctcacattccttaaattaaggag

SEQ ID NO: 10375 - DNA, 23 bp, Homo sapiens
  source 1..23: mol_type = genomic DNA
tcacattccttaaattaaggagt

SEQ ID NO: 10376 - DNA, 23 bp, Homo sapiens
  source 1..23: mol_type = genomic DNA
cacattccttaaattaaggagta

SEQ ID NO: 10377 - DNA, 23 bp, Homo sapiens
  source 1..23: mol_type = genomic DNA
acattccttaaattaaggagtaa

SEQ ID NO: 10378 - DNA, 23 bp, Homo sapiens
  source 1..23: mol_type = genomic DNA
cattccttaaattaaggagtaag

SEQ ID NO: 10379 - DNA, 23 bp, Homo sapiens
  source 1..23: mol_type = genomic DNA
attccttaaattaaggagtaagt

SEQ ID NO: 10380 - DNA, 23 bp, Homo sapiens
  source 1..23: mol_type = genomic DNA
ttccttaaattaaggagtaagtc

SEQ ID NO: 10381 - DNA, 23 bp, Homo sapiens
  source 1..23: mol_type = genomic DNA
tccttaaattaaggagtaagtct

SEQ ID NO: 10382 - DNA, 23 bp, Homo sapiens
  source 1..23: mol_type = genomic DNA
ccttaaattaaggagtaagtctg

SEQ ID NO: 10383 - DNA, 23 bp, Homo sapiens
  source 1..23: mol_type = genomic DNA
cttaaattaaggagtaagtctgc

SEQ ID NO: 10384 - DNA, 23 bp, Homo sapiens
  source 1..23: mol_type = genomic DNA
ttaaattaaggagtaagtctgcc

SEQ ID NO: 10385 - DNA, 23 bp, Homo sapiens
  source 1..23: mol_type = genomic DNA
taaattaaggagtaagtctgcca

SEQ ID NO: 10386 - DNA, 23 bp, Homo sapiens
  source 1..23: mol_type = genomic DNA
aaattaaggagtaagtctgccag

SEQ ID NO: 10387 - DNA, 23 bp, Homo sapiens
  source 1..23: mol_type = genomic DNA
aattaaggagtaagtctgccagc

SEQ ID NO: 10388 - DNA, 23 bp, Homo sapiens
  source 1..23: mol_type = genomic DNA
attaaggagtaagtctgccagca

SEQ ID NO: 10389 - DNA, 23 bp, Homo sapiens
  source 1..23: mol_type = genomic DNA
ttaaggagtaagtctgccagcat

SEQ ID NO: 10390 - DNA, 23 bp, Homo sapiens
  source 1..23: mol_type = genomic DNA
taaggagtaagtctgccagcatt

SEQ ID NO: 10391 - DNA, 23 bp, Homo sapiens
  source 1..23: mol_type = genomic DNA
aaggagtaagtctgccagcatta

SEQ ID NO: 10392 - DNA, 23 bp, Homo sapiens
  source 1..23: mol_type = genomic DNA
aggagtaagtctgccagcattat

SEQ ID NO: 10393 - DNA, 23 bp, Homo sapiens
  source 1..23: mol_type = genomic DNA
ggagtaagtctgccagcattatg

SEQ ID NO: 10394 - DNA, 23 bp, Homo sapiens
  source 1..23: mol_type = genomic DNA
gagtaagtctgccagcattatga

SEQ ID NO: 10395 - DNA, 23 bp, Homo sapiens
  source 1..23: mol_type = genomic DNA
agtaagtctgccagcattatgaa

SEQ ID NO: 10396 - DNA, 23 bp, Homo sapiens
  source 1..23: mol_type = genomic DNA
gtaagtctgccagcattatgaaa

SEQ ID NO: 10397 - DNA, 23 bp, Homo sapiens
  source 1..23: mol_type = genomic DNA
taagtctgccagcattatgaaag

SEQ ID NO: 10398 - DNA, 23 bp, Homo sapiens
  source 1..23: mol_type = genomic DNA
aagtctgccagcattatgaaagt

SEQ ID NO: 10399 - DNA, 23 bp, Homo sapiens
  source 1..23: mol_type = genomic DNA
agtctgccagcattatgaaagtg

SEQ ID NO: 10400 - DNA, 23 bp, Homo sapiens
  source 1..23: mol_type = genomic DNA
gtctgccagcattatgaaagtga

SEQ ID NO: 10401 - DNA, 23 bp, Homo sapiens
  source 1..23: mol_type = genomic DNA
tctgccagcattatgaaagtgaa

SEQ ID NO: 10402 - DNA, 23 bp, Homo sapiens
  source 1..23: mol_type = genomic DNA
ctgccagcattatgaaagtgaat

SEQ ID NO: 10403 - DNA, 23 bp, Homo sapiens
  source 1..23: mol_type = genomic DNA
tgccagcattatgaaagtgaatc

SEQ ID NO: 10404 - DNA, 23 bp, Homo sapiens
  source 1..23: mol_type = genomic DNA
gccagcattatgaaagtgaatct

SEQ ID NO: 10405 - DNA, 23 bp, Homo sapiens
  source 1..23: mol_type = genomic DNA
ccagcattatgaaagtgaatctt

SEQ ID NO: 10406 - DNA, 23 bp, Homo sapiens
  source 1..23: mol_type = genomic DNA
cagcattatgaaagtgaatctta

SEQ ID NO: 10407 - DNA, 23 bp, Homo sapiens
  source 1..23: mol_type = genomic DNA
agcattatgaaagtgaatcttac

SEQ ID NO: 10408 - DNA, 23 bp, Homo sapiens
  source 1..23: mol_type = genomic DNA
gcattatgaaagtgaatcttact

SEQ ID NO: 10409 - DNA, 23 bp, Homo sapiens
  source 1..23: mol_type = genomic DNA
cattatgaaagtgaatcttactt

SEQ ID NO: 10410 - DNA, 23 bp, Homo sapiens
  source 1..23: mol_type = genomic DNA
attatgaaagtgaatcttacttt

SEQ ID NO: 10411 - DNA, 23 bp, Homo sapiens
  source 1..23: mol_type = genomic DNA
ttatgaaagtgaatcttactttt

SEQ ID NO: 10412 - DNA, 23 bp, Homo sapiens
  source 1..23: mol_type = genomic DNA
tatgaaagtgaatcttacttttg

SEQ ID NO: 10413 - DNA, 23 bp, Homo sapiens
  source 1..23: mol_type = genomic DNA
atgaaagtgaatcttacttttgt

SEQ ID NO: 10414 - DNA, 23 bp, Homo sapiens
  source 1..23: mol_type = genomic DNA
tgaaagtgaatcttacttttgta

SEQ ID NO: 10415 - DNA, 23 bp, Homo sapiens
  source 1..23: mol_type = genomic DNA
gaaagtgaatcttacttttgtaa

SEQ ID NO: 10416 - DNA, 23 bp, Homo sapiens
  source 1..23: mol_type = genomic DNA
aaagtgaatcttacttttgtaaa

SEQ ID NO: 10417 - DNA, 23 bp, Homo sapiens
  source 1..23: mol_type = genomic DNA
aagtgaatcttacttttgtaaaa

SEQ ID NO: 10418 - DNA, 23 bp, Homo sapiens
  source 1..23: mol_type = genomic DNA
agtgaatcttacttttgtaaaac

SEQ ID NO: 10419 - DNA, 23 bp, Homo sapiens
  source 1..23: mol_type = genomic DNA
gtgaatcttacttttgtaaaact

SEQ ID NO: 10420 - DNA, 23 bp, Homo sapiens
  source 1..23: mol_type = genomic DNA
tgaatcttacttttgtaaaactt

SEQ ID NO: 10421 - DNA, 23 bp, Homo sapiens
  source 1..23: mol_type = genomic DNA
gaatcttacttttgtaaaacttt

SEQ ID NO: 10422 - DNA, 23 bp, Homo sapiens
  source 1..23: mol_type = genomic DNA
aatcttacttttgtaaaacttta

SEQ ID NO: 10423 - DNA, 23 bp, Homo sapiens
  source 1..23: mol_type = genomic DNA
atcttacttttgtaaaactttat

SEQ ID NO: 10424 - DNA, 23 bp, Homo sapiens
  source 1..23: mol_type = genomic DNA
tcttacttttgtaaaactttatg

SEQ ID NO: 10425 - DNA, 23 bp, Homo sapiens
  source 1..23: mol_type = genomic DNA
cttacttttgtaaaactttatgg

SEQ ID NO: 10426 - DNA, 23 bp, Homo sapiens
  source 1..23: mol_type = genomic DNA
ttacttttgtaaaactttatggt

SEQ ID NO: 10427 - DNA, 23 bp, Homo sapiens
  source 1..23: mol_type = genomic DNA
tacttttgtaaaactttatggtt

SEQ ID NO: 10428 - DNA, 23 bp, Homo sapiens
  source 1..23: mol_type = genomic DNA
acttttgtaaaactttatggttt

SEQ ID NO: 10429 - DNA, 23 bp, Homo sapiens
  source 1..23: mol_type = genomic DNA
cttttgtaaaactttatggtttg

SEQ ID NO: 10430 - DNA, 23 bp, Homo sapiens
  source 1..23: mol_type = genomic DNA
ttttgtaaaactttatggtttgt

SEQ ID NO: 10431 - DNA, 23 bp, Homo sapiens
  source 1..23: mol_type = genomic DNA
tttgtaaaactttatggtttgtg

SEQ ID NO: 10432 - DNA, 23 bp, Homo sapiens
  source 1..23: mol_type = genomic DNA
ttgtaaaactttatggtttgtgg

SEQ ID NO: 10433 - DNA, 23 bp, Homo sapiens
  source 1..23: mol_type = genomic DNA
tgtaaaactttatggtttgtgga

SEQ ID NO: 10434 - DNA, 23 bp, Homo sapiens
  source 1..23: mol_type = genomic DNA
gtaaaactttatggtttgtggaa

SEQ ID NO: 10435 - DNA, 23 bp, Homo sapiens
  source 1..23: mol_type = genomic DNA
taaaactttatggtttgtggaaa

SEQ ID NO: 10436 - DNA, 23 bp, Homo sapiens
  source 1..23: mol_type = genomic DNA
aaaactttatggtttgtggaaaa

SEQ ID NO: 10437 - DNA, 23 bp, Homo sapiens
  source 1..23: mol_type = genomic DNA
aaactttatggtttgtggaaaac

SEQ ID NO: 10438 - DNA, 23 bp, Homo sapiens
  source 1..23: mol_type = genomic DNA
aactttatggtttgtggaaaaca

SEQ ID NO: 10439 - DNA, 23 bp, Homo sapiens
  source 1..23: mol_type = genomic DNA
actttatggtttgtggaaaacaa

SEQ ID NO: 10440 - DNA, 23 bp, Homo sapiens
  source 1..23: mol_type = genomic DNA
ctttatggtttgtggaaaacaaa

SEQ ID NO: 10441 - DNA, 23 bp, Homo sapiens
  source 1..23: mol_type = genomic DNA
tttatggtttgtggaaaacaaat

SEQ ID NO: 10442 - DNA, 23 bp, Homo sapiens
  source 1..23: mol_type = genomic DNA
ttatggtttgtggaaaacaaatg

SEQ ID NO: 10443 - DNA, 23 bp, Homo sapiens
  source 1..23: mol_type = genomic DNA
tatggtttgtggaaaacaaatgt

SEQ ID NO: 10444 - DNA, 23 bp, Homo sapiens
  source 1..23: mol_type = genomic DNA
atggtttgtggaaaacaaatgtt

SEQ ID NO: 10445 - DNA, 23 bp, Homo sapiens
  source 1..23: mol_type = genomic DNA
tggtttgtggaaaacaaatgttt

SEQ ID NO: 10446 - DNA, 23 bp, Homo sapiens
  source 1..23: mol_type = genomic DNA
ggtttgtggaaaacaaatgtttt

SEQ ID NO: 10447 - DNA, 23 bp, Homo sapiens
  source 1..23: mol_type = genomic DNA
gtttgtggaaaacaaatgttttt

SEQ ID NO: 10448 - DNA, 23 bp, Homo sapiens
  source 1..23: mol_type = genomic DNA
tttgtggaaaacaaatgtttttg

SEQ ID NO: 10449 - DNA, 23 bp, Homo sapiens
  source 1..23: mol_type = genomic DNA
ttgtggaaaacaaatgtttttga

SEQ ID NO: 10450 - DNA, 23 bp, Homo sapiens
  source 1..23: mol_type = genomic DNA
tgtggaaaacaaatgtttttgaa

SEQ ID NO: 10451 - DNA, 23 bp, Homo sapiens
  source 1..23: mol_type = genomic DNA
gtggaaaacaaatgtttttgaac

SEQ ID NO: 10452 - DNA, 23 bp, Homo sapiens
  source 1..23: mol_type = genomic DNA
tggaaaacaaatgtttttgaaca

SEQ ID NO: 10453 - DNA, 23 bp, Homo sapiens
  source 1..23: mol_type = genomic DNA
ggaaaacaaatgtttttgaacat

SEQ ID NO: 10454 - DNA, 23 bp, Homo sapiens
  source 1..23: mol_type = genomic DNA
gaaaacaaatgtttttgaacatt

SEQ ID NO: 10455 - DNA, 23 bp, Homo sapiens
  source 1..23: mol_type = genomic DNA
aaaacaaatgtttttgaacattt

SEQ ID NO: 10456 - DNA, 23 bp, Homo sapiens
  source 1..23: mol_type = genomic DNA
aaacaaatgtttttgaacattta

SEQ ID NO: 10457 - DNA, 23 bp, Homo sapiens
  source 1..23: mol_type = genomic DNA
aacaaatgtttttgaacatttaa

SEQ ID NO: 10458 - DNA, 23 bp, Homo sapiens
  source 1..23: mol_type = genomic DNA
acaaatgtttttgaacatttaaa

SEQ ID NO: 10459 - DNA, 23 bp, Homo sapiens
  source 1..23: mol_type = genomic DNA
caaatgtttttgaacatttaaaa

SEQ ID NO: 10460 - DNA, 23 bp, Homo sapiens
  source 1..23: mol_type = genomic DNA
aaatgtttttgaacatttaaaaa

SEQ ID NO: 10461 - DNA, 23 bp, Homo sapiens
  source 1..23: mol_type = genomic DNA
aatgtttttgaacatttaaaaag

SEQ ID NO: 10462 - DNA, 23 bp, Homo sapiens
  source 1..23: mol_type = genomic DNA
atgtttttgaacatttaaaaagt

SEQ ID NO: 10463 - DNA, 23 bp, Homo sapiens
  source 1..23: mol_type = genomic DNA
tgtttttgaacatttaaaaagtt

SEQ ID NO: 10464 - DNA, 23 bp, Homo sapiens
  source 1..23: mol_type = genomic DNA
gtttttgaacatttaaaaagttc

SEQ ID NO: 10465 - DNA, 23 bp, Homo sapiens
  source 1..23: mol_type = genomic DNA
tttttgaacatttaaaaagttca

SEQ ID NO: 10466 - DNA, 23 bp, Homo sapiens
  source 1..23: mol_type = genomic DNA
ttttgaacatttaaaaagttcag

SEQ ID NO: 10467 - DNA, 23 bp, Homo sapiens
  source 1..23: mol_type = genomic DNA
tttgaacatttaaaaagttcaga

SEQ ID NO: 10468 - DNA, 23 bp, Homo sapiens
  source 1..23: mol_type = genomic DNA
ttgaacatttaaaaagttcagat

SEQ ID NO: 10469 - DNA, 23 bp, Homo sapiens
  source 1..23: mol_type = genomic DNA
tgaacatttaaaaagttcagatg

SEQ ID NO: 10470 - DNA, 23 bp, Homo sapiens
  source 1..23: mol_type = genomic DNA
gaacatttaaaaagttcagatgt

SEQ ID NO: 10471 - DNA, 23 bp, Homo sapiens
  source 1..23: mol_type = genomic DNA
aacatttaaaaagttcagatgtt

SEQ ID NO: 10472 - DNA, 23 bp, Homo sapiens
  source 1..23: mol_type = genomic DNA
acatttaaaaagttcagatgtta

SEQ ID NO: 10473 - DNA, 23 bp, Homo sapiens
  source 1..23: mol_type = genomic DNA
catttaaaaagttcagatgttag

SEQ ID NO: 10474 - DNA, 23 bp, Homo sapiens
  source 1..23: mol_type = genomic DNA
atttaaaaagttcagatgttaga

SEQ ID NO: 10475 - DNA, 23 bp, Homo sapiens
  source 1..23: mol_type = genomic DNA
tttaaaaagttcagatgttagaa

SEQ ID NO: 10476 - DNA, 23 bp, Homo sapiens
  source 1..23: mol_type = genomic DNA
ttaaaaagttcagatgttagaaa

SEQ ID NO: 10477 - DNA, 23 bp, Homo sapiens
  source 1..23: mol_type = genomic DNA
taaaaagttcagatgttagaaag

SEQ ID NO: 10478 - DNA, 23 bp, Homo sapiens
  source 1..23: mol_type = genomic DNA
aaaaagttcagatgttagaaagt

SEQ ID NO: 10479 - DNA, 23 bp, Homo sapiens
  source 1..23: mol_type = genomic DNA
aaaagttcagatgttagaaagtt

SEQ ID NO: 10480 - DNA, 23 bp, Homo sapiens
  source 1..23: mol_type = genomic DNA
aaagttcagatgttagaaagttg

SEQ ID NO: 10481 - DNA, 23 bp, Homo sapiens
  source 1..23: mol_type = genomic DNA
aagttcagatgttagaaagttga

SEQ ID NO: 10482 - DNA, 23 bp, Homo sapiens
  source 1..23: mol_type = genomic DNA
agttcagatgttagaaagttgaa

SEQ ID NO: 10483 - DNA, 23 bp, Homo sapiens
  source 1..23: mol_type = genomic DNA
gttcagatgttagaaagttgaaa

SEQ ID NO: 10484 - DNA, 23 bp, Homo sapiens
  source 1..23: mol_type = genomic DNA
ttcagatgttagaaagttgaaag

SEQ ID NO: 10485 - DNA, 23 bp, Homo sapiens
  source 1..23: mol_type = genomic DNA
tcagatgttagaaagttgaaagg

SEQ ID NO: 10486 - DNA, 23 bp, Homo sapiens
  source 1..23: mol_type = genomic DNA
cagatgttagaaagttgaaaggt

SEQ ID NO: 10487 - DNA, 23 bp, Homo sapiens
  source 1..23: mol_type = genomic DNA
agatgttagaaagttgaaaggtt

SEQ ID NO: 10488 - DNA, 23 bp, Homo sapiens
  source 1..23: mol_type = genomic DNA
gatgttagaaagttgaaaggtta

SEQ ID NO: 10489 - DNA, 23 bp, Homo sapiens
  source 1..23: mol_type = genomic DNA
atgttagaaagttgaaaggttaa

SEQ ID NO: 10490 - DNA, 23 bp, Homo sapiens
  source 1..23: mol_type = genomic DNA
tgttagaaagttgaaaggttaat

SEQ ID NO: 10491 - DNA, 23 bp, Homo sapiens
  source 1..23: mol_type = genomic DNA
gttagaaagttgaaaggttaatg

SEQ ID NO: 10492 - DNA, 23 bp, Homo sapiens
  source 1..23: mol_type = genomic DNA
ttagaaagttgaaaggttaatgt

SEQ ID NO: 10493 - DNA, 23 bp, Homo sapiens
  source 1..23: mol_type = genomic DNA
tagaaagttgaaaggttaatgta

SEQ ID NO: 10494 - DNA, 23 bp, Homo sapiens
  source 1..23: mol_type = genomic DNA
agaaagttgaaaggttaatgtaa

SEQ ID NO: 10495 - DNA, 23 bp, Homo sapiens
  source 1..23: mol_type = genomic DNA
gaaagttgaaaggttaatgtaaa

SEQ ID NO: 10496 - DNA, 23 bp, Homo sapiens
  source 1..23: mol_type = genomic DNA
aaagttgaaaggttaatgtaaaa

SEQ ID NO: 10497 - DNA, 23 bp, Homo sapiens
  source 1..23: mol_type = genomic DNA
aagttgaaaggttaatgtaaaac

SEQ ID NO: 10498 - DNA, 23 bp, Homo sapiens
  source 1..23: mol_type = genomic DNA
agttgaaaggttaatgtaaaaca

SEQ ID NO: 10499 - DNA, 23 bp, Homo sapiens
  source 1..23: mol_type = genomic DNA
gttgaaaggttaatgtaaaacaa

SEQ ID NO: 10500 - DNA, 23 bp, Homo sapiens
  source 1..23: mol_type = genomic DNA
ttgaaaggttaatgtaaaacaat

SEQ ID NO: 10501 - DNA, 23 bp, Homo sapiens
  source 1..23: mol_type = genomic DNA
tgaaaggttaatgtaaaacaatc

SEQ ID NO: 10502 - DNA, 23 bp, Homo sapiens
  source 1..23: mol_type = genomic DNA
gaaaggttaatgtaaaacaatca

SEQ ID NO: 10503 - DNA, 23 bp, Homo sapiens
  source 1..23: mol_type = genomic DNA
aaaggttaatgtaaaacaatcaa

SEQ ID NO: 10504 - DNA, 23 bp, Homo sapiens
  source 1..23: mol_type = genomic DNA
aaggttaatgtaaaacaatcaat

SEQ ID NO: 10505 - DNA, 23 bp, Homo sapiens
  source 1..23: mol_type = genomic DNA
aggttaatgtaaaacaatcaata

SEQ ID NO: 10506 - DNA, 23 bp, Homo sapiens
  source 1..23: mol_type = genomic DNA
ggttaatgtaaaacaatcaatat

SEQ ID NO: 10507 - DNA, 23 bp, Homo sapiens
  source 1..23: mol_type = genomic DNA
gttaatgtaaaacaatcaatatt

SEQ ID NO: 10508 - DNA, 23 bp, Homo sapiens
  source 1..23: mol_type = genomic DNA
ttaatgtaaaacaatcaatatta

SEQ ID NO: 10509 - DNA, 23 bp, Homo sapiens
  source 1..23: mol_type = genomic DNA
taatgtaaaacaatcaatattaa

SEQ ID NO: 10510 - DNA, 23 bp, Homo sapiens
  source 1..23: mol_type = genomic DNA
aatgtaaaacaatcaatattaaa

SEQ ID NO: 10511 - DNA, 23 bp, Homo sapiens
  source 1..23: mol_type = genomic DNA
atgtaaaacaatcaatattaaag

SEQ ID NO: 10512 - DNA, 23 bp, Homo sapiens
  source 1..23: mol_type = genomic DNA
tgtaaaacaatcaatattaaaga

SEQ ID NO: 10513 - DNA, 23 bp, Homo sapiens
  source 1..23: mol_type = genomic DNA
gtaaaacaatcaatattaaagaa

SEQ ID NO: 10514 - DNA, 23 bp, Homo sapiens
  source 1..23: mol_type = genomic DNA
taaaacaatcaatattaaagaat

SEQ ID NO: 10515 - DNA, 23 bp, Homo sapiens
  source 1..23: mol_type = genomic DNA
aaaacaatcaatattaaagaatt

SEQ ID NO: 10516 - DNA, 23 bp, Homo sapiens
  source 1..23: mol_type = genomic DNA
aaacaatcaatattaaagaattt

SEQ ID NO: 10517 - DNA, 23 bp, Homo sapiens
  source 1..23: mol_type = genomic DNA
aacaatcaatattaaagaatttt

SEQ ID NO: 10518 - DNA, 23 bp, Homo sapiens
  source 1..23: mol_type = genomic DNA
acaatcaatattaaagaattttg

SEQ ID NO: 10519 - DNA, 23 bp, Homo sapiens
  source 1..23: mol_type = genomic DNA
caatcaatattaaagaattttga

SEQ ID NO: 10520 - DNA, 23 bp, Homo sapiens
  source 1..23: mol_type = genomic DNA
aatcaatattaaagaattttgat

SEQ ID NO: 10521 - DNA, 23 bp, Homo sapiens
  source 1..23: mol_type = genomic DNA
atcaatattaaagaattttgatg

SEQ ID NO: 10522 - DNA, 23 bp, Homo sapiens
  source 1..23: mol_type = genomic DNA
tcaatattaaagaattttgatgc

SEQ ID NO: 10523 - DNA, 23 bp, Homo sapiens
  source 1..23: mol_type = genomic DNA
caatattaaagaattttgatgcc

SEQ ID NO: 10524 - DNA, 23 bp, Homo sapiens
  source 1..23: mol_type = genomic DNA
aatattaaagaattttgatgcca

SEQ ID NO: 10525 - DNA, 23 bp, Homo sapiens
  source 1..23: mol_type = genomic DNA
atattaaagaattttgatgccaa

SEQ ID NO: 10526 - DNA, 23 bp, Homo sapiens
  source 1..23: mol_type = genomic DNA
tattaaagaattttgatgccaaa

SEQ ID NO: 10527 - DNA, 23 bp, Homo sapiens
  source 1..23: mol_type = genomic DNA
attaaagaattttgatgccaaaa

SEQ ID NO: 10528 - DNA, 23 bp, Homo sapiens
  source 1..23: mol_type = genomic DNA
ttaaagaattttgatgccaaaac

SEQ ID NO: 10529 - DNA, 23 bp, Homo sapiens
  source 1..23: mol_type = genomic DNA
taaagaattttgatgccaaaact

SEQ ID NO: 10530 - DNA, 23 bp, Homo sapiens
  source 1..23: mol_type = genomic DNA
aaagaattttgatgccaaaacta

SEQ ID NO: 10531 - DNA, 23 bp, Homo sapiens
  source 1..23: mol_type = genomic DNA
aagaattttgatgccaaaactat

SEQ ID NO: 10532 - DNA, 23 bp, Homo sapiens
  source 1..23: mol_type = genomic DNA
agaattttgatgccaaaactatt

SEQ ID NO: 10533 - DNA, 23 bp, Homo sapiens
  source 1..23: mol_type = genomic DNA
gaattttgatgccaaaactatta

SEQ ID NO: 10534 - DNA, 23 bp, Homo sapiens
  source 1..23: mol_type = genomic DNA
aattttgatgccaaaactattag

SEQ ID NO: 10535 - DNA, 23 bp, Homo sapiens
  source 1..23: mol_type = genomic DNA
attttgatgccaaaactattaga

SEQ ID NO: 10536 - DNA, 23 bp, Homo sapiens
  source 1..23: mol_type = genomic DNA
ttttgatgccaaaactattagat

SEQ ID NO: 10537 - DNA, 23 bp, Homo sapiens
  source 1..23: mol_type = genomic DNA
tttgatgccaaaactattagata

SEQ ID NO: 10538 - DNA, 23 bp, Homo sapiens
  source 1..23: mol_type = genomic DNA
ttgatgccaaaactattagataa

SEQ ID NO: 10539 - DNA, 23 bp, Homo sapiens
  source 1..23: mol_type = genomic DNA
tgatgccaaaactattagataaa

SEQ ID NO: 10540 - DNA, 23 bp, Homo sapiens
  source 1..23: mol_type = genomic DNA
gatgccaaaactattagataaaa

SEQ ID NO: 10541 - DNA, 23 bp, Homo sapiens
  source 1..23: mol_type = genomic DNA
atgccaaaactattagataaaag

SEQ ID NO: 10542 - DNA, 23 bp, Homo sapiens
  source 1..23: mol_type = genomic DNA
tgccaaaactattagataaaagg

SEQ ID NO: 10543 - DNA, 23 bp, Homo sapiens
  source 1..23: mol_type = genomic DNA
gccaaaactattagataaaaggt

SEQ ID NO: 10544 - DNA, 23 bp, Homo sapiens
  source 1..23: mol_type = genomic DNA
ccaaaactattagataaaaggtt

SEQ ID NO: 10545 - DNA, 23 bp, Homo sapiens
  source 1..23: mol_type = genomic DNA
caaaactattagataaaaggtta

SEQ ID NO: 10546 - DNA, 23 bp, Homo sapiens
  source 1..23: mol_type = genomic DNA
aaaactattagataaaaggttaa

SEQ ID NO: 10547 - DNA, 23 bp, Homo sapiens
  source 1..23: mol_type = genomic DNA
aaactattagataaaaggttaat

SEQ ID NO: 10548 - DNA, 23 bp, Homo sapiens
  source 1..23: mol_type = genomic DNA
aactattagataaaaggttaatc

SEQ ID NO: 10549 - DNA, 23 bp, Homo sapiens
  source 1..23: mol_type = genomic DNA
actattagataaaaggttaatct

SEQ ID NO: 10550 - DNA, 23 bp, Homo sapiens
  source 1..23: mol_type = genomic DNA
ctattagataaaaggttaatcta

SEQ ID NO: 10551 - DNA, 23 bp, Homo sapiens
  source 1..23: mol_type = genomic DNA
tattagataaaaggttaatctac

SEQ ID NO: 10552 - DNA, 23 bp, Homo sapiens
  source 1..23: mol_type = genomic DNA
attagataaaaggttaatctaca

SEQ ID NO: 10553 - DNA, 23 bp, Homo sapiens
  source 1..23: mol_type = genomic DNA
ttagataaaaggttaatctacat

SEQ ID NO: 10554 - DNA, 23 bp, Homo sapiens
  source 1..23: mol_type = genomic DNA
tagataaaaggttaatctacatc

SEQ ID NO: 10555 - DNA, 23 bp, Homo sapiens
  source 1..23: mol_type = genomic DNA
agataaaaggttaatctacatcc

SEQ ID NO: 10556 - DNA, 23 bp, Homo sapiens
  source 1..23: mol_type = genomic DNA
gataaaaggttaatctacatccc

SEQ ID NO: 10557 - DNA, 23 bp, Homo sapiens
  source 1..23: mol_type = genomic DNA
ataaaaggttaatctacatccct

SEQ ID NO: 10558 - DNA, 23 bp, Homo sapiens
  source 1..23: mol_type = genomic DNA
taaaaggttaatctacatcccta

SEQ ID NO: 10559 - DNA, 23 bp, Homo sapiens
  source 1..23: mol_type = genomic DNA
aaaaggttaatctacatccctac

SEQ ID NO: 10560 - DNA, 23 bp, Homo sapiens
  source 1..23: mol_type = genomic DNA
aaaggttaatctacatccctact

SEQ ID NO: 10561 - DNA, 23 bp, Homo sapiens
  source 1..23: mol_type = genomic DNA
aaggttaatctacatccctacta

SEQ ID NO: 10562 - DNA, 23 bp, Homo sapiens
  source 1..23: mol_type = genomic DNA
aggttaatctacatccctactag

SEQ ID NO: 10563 - DNA, 23 bp, Homo sapiens
  source 1..23: mol_type = genomic DNA
ggttaatctacatccctactaga

SEQ ID NO: 10564 - DNA, 23 bp, Homo sapiens
  source 1..23: mol_type = genomic DNA
gttaatctacatccctactagaa

SEQ ID NO: 10565 - DNA, 23 bp, Homo sapiens
  source 1..23: mol_type = genomic DNA
ttaatctacatccctactagaat

SEQ ID NO: 10566 - DNA, 23 bp, Homo sapiens
  source 1..23: mol_type = genomic DNA
taatctacatccctactagaatt

SEQ ID NO: 10567 - DNA, 23 bp, Homo sapiens
  source 1..23: mol_type = genomic DNA
aatctacatccctactagaattc

SEQ ID NO: 10568 - DNA, 23 bp, Homo sapiens
  source 1..23: mol_type = genomic DNA
atctacatccctactagaattct

SEQ ID NO: 10569 - DNA, 23 bp, Homo sapiens
  source 1..23: mol_type = genomic DNA
tctacatccctactagaattctc

SEQ ID NO: 10570 - DNA, 23 bp, Homo sapiens
  source 1..23: mol_type = genomic DNA
ctacatccctactagaattctca

SEQ ID NO: 10571 - DNA, 23 bp, Homo sapiens
  source 1..23: mol_type = genomic DNA
tacatccctactagaattctcat

SEQ ID NO: 10572 - DNA, 23 bp, Homo sapiens
  source 1..23: mol_type = genomic DNA
acatccctactagaattctcata

SEQ ID NO: 10573 - DNA, 23 bp, Homo sapiens
  source 1..23: mol_type = genomic DNA
catccctactagaattctcatac

SEQ ID NO: 10574-10640 - skipped (67 entries)

SEQ ID NO: 10641 - DNA, 20 bp, synthetic construct
  source 1..20: mol_type = other DNA
attcactttcataatgctgg

SEQ ID NO: 10642 - DNA, 25 bp, synthetic construct
  source 1..25: mol_type = other DNA
gtaagattcactttcataatgctgg

SEQ ID NO: 10643 - DNA, 25 bp, synthetic construct
  source 1..25: mol_type = other DNA
attcactttcataatgctggcagac

SEQ ID NO: 10644 - DNA, 25 bp, synthetic construct
  source 1..25: mol_type = other DNA
  modified_base 7: mod_base = OTHER; note = A nucleoside-replacement group characterized by the lack of a nucleotide base
  modified_base 19: mod_base = OTHER; note = A nucleoside-replacement group characterized by the lack of a nucleotide base
gtaagantcactttcatantgctgg

SEQ ID NO: 10645 - DNA, 25 bp, synthetic construct
  source 1..25: mol_type = other DNA
  modified_base 9: mod_base = OTHER; note = A nucleoside-replacement group characterized by the lack of a nucleotide base
  modified_base 19: mod_base = OTHER; note = A nucleoside-replacement group characterized by the lack of a nucleotide base
gtaagattnactttcatantgctgg

SEQ ID NO: 10646 - DNA, 25 bp, synthetic construct
  source 1..25: mol_type = other DNA
  modified_base 7: mod_base = OTHER; note = A nucleoside-replacement group characterized by the lack of a nucleotide base
  modified_base 19: mod_base = OTHER; note = A nucleoside-replacement group characterized by the lack of a nucleotide base
attcacnttcataatgctngcagac

SEQ ID NO: 10647 - DNA, 25 bp, synthetic construct
  source 1..25: mol_type = other DNA
  modified_base 9: mod_base = OTHER; note = A nucleoside-replacement group characterized by the lack of a nucleotide base
  modified_base 19: mod_base = OTHER; note = A nucleoside-replacement group characterized by the lack of a nucleotide base
attcacttncataatgctngcagac

SEQ ID NO: 10648 - DNA, 23 bp, synthetic construct
  source 1..23: mol_type = other DNA
aagattcactttcataatgctgg

SEQ ID NO: 10649 - DNA, 23 bp, synthetic construct
  source 1..23: mol_type = other DNA
  modified_base 8: mod_base = OTHER; note = A nucleoside-replacement group characterized by the lack of a nucleotide base
  modified_base 16: mod_base = OTHER; note = A nucleoside-replacement group characterized by the lack of a nucleotide base
aagattcnctttcatnatgctgg

SEQ ID NO: 10650 - DNA, 23 bp, synthetic construct
  source 1..23: mol_type = other DNA
agattcactttcataatgctggc

SEQ ID NO: 10651 - DNA, 23 bp, synthetic construct
  source 1..23: mol_type = other DNA
  modified_base 8: mod_base = OTHER; note = A nucleoside-replacement group characterized by the lack of a nucleotide base
  modified_base 16: mod_base = OTHER; note = A nucleoside-replacement group characterized by the lack of a nucleotide base
agattcantttcatantgctggc

SEQ ID NO: 10652 - DNA, 19 bp, synthetic construct
  source 1..19: mol_type = other DNA
gggagaacgaccactttga

SEQ ID NO: 10653 - DNA, 21 bp, synthetic construct
  source 1..21: mol_type = other DNA
gaagaaggagacaccgatgag

SEQ ID NO: 10654 - DNA, 24 bp, synthetic construct
  source 1..24: mol_type = other DNA
tagccaatggtggtcagcgtgatc

SEQ ID NO: 10655 - DNA, 27 bp, synthetic construct
  source 1..27: mol_type = other DNA
ctctctcgcacacacgcacacatgctc

SEQ ID NO: 10656 - DNA, 27 bp, synthetic construct
  source 1..27: mol_type = other DNA
  modified_base 7: mod_base = OTHER; note = A nucleoside-replacement group characterized by the lack of a nucleotide base
  modified_base 14: mod_base = OTHER; note = A nucleoside-replacement group characterized by the lack of a nucleotide base
  modified_base 21: mod_base = OTHER; note = A nucleoside-replacement group characterized by the lack of a nucleotide base
ctctctngcacacncgcacanatgctc

SEQ ID NO: 10657 - DNA, 27 bp, synthetic construct
  source 1..27: mol_type = other DNA
gagtcctgcaatatgaatataatttta

SEQ ID NO: 10658 - DNA, 27 bp, synthetic construct
  source 1..27: mol_type = other DNA
  modified_base 7: mod_base = OTHER; note = A nucleoside-replacement group characterized by the lack of a nucleotide base
  modified_base 14: mod_base = OTHER; note = A nucleoside-replacement group characterized by the lack of a nucleotide base
  modified_base 21: mod_base = OTHER; note = A nucleoside-replacement group characterized by the lack of a nucleotide base
gagtccngcaatangaatatnatttta

SEQ ID NO: 10659 - skipped

SEQ ID NO: 10660 - DNA, 23 bp, synthetic construct
  source 1..23: mol_type = other DNA
  modified_base 8: mod_base = OTHER; note = A nucleoside-replacement group characterized by the lack of a nucleotide base
  modified_base 16: mod_base = OTHER; note = A nucleoside-replacement group characterized by the lack of a nucleotide base
tctctcgnacacacgnacacatg

SEQ ID NO: 10661 - DNA, 23 bp, synthetic construct
  source 1..23: mol_type = other DNA
  modified_base 8: mod_base = OTHER; note = A nucleoside-replacement group characterized by the lack of a nucleotide base
  modified_base 16: mod_base = OTHER; note = A nucleoside-replacement group characterized by the lack of a nucleotide base
tctctcgnacacacgnacacatg

SEQ ID NO: 10662 - DNA, 23 bp, synthetic construct
  source 1..23: mol_type = other DNA
  modified_base 8: mod_base = OTHER; note = A nucleoside-replacement group characterized by the lack of a nucleotide base
  modified_base 16: mod_base = OTHER; note = A nucleoside-replacement group characterized by the lack of a nucleotide base
gcacacangctcacanagagagc

SEQ ID NO: 10663 - DNA, 23 bp, synthetic construct
  source 1..23: mol_type = other DNA
  modified_base 8: mod_base = OTHER; note = A nucleoside-replacement group characterized by the lack of a nucleotide base
  modified_base 16: mod_base = OTHER; note = A nucleoside-replacement group characterized by the lack of a nucleotide base
gcacacangctcacanagagagc

SEQ ID NO: 10664-10666 - skipped (3 entries)

SEQ ID NO: 10667 - DNA, 23 bp, synthetic construct
  source 1..23: mol_type = other DNA
  modified_base 8: mod_base = OTHER; note = A nucleoside-replacement group characterized by the lack of a nucleotide base
  modified_base 16: mod_base = OTHER; note = A nucleoside-replacement group characterized by the lack of a nucleotide base
ctttctcncgaaggtnttctgcc

SEQ ID NO: 10668 - skipped

SEQ ID NO: 10669 - DNA, 23 bp, synthetic construct
  source 1..23: mol_type = other DNA
  modified_base 8: mod_base = OTHER; note = A nucleoside-replacement group characterized by the lack of a nucleotide base
  modified_base 16: mod_base = OTHER; note = A nucleoside-replacement group characterized by the lack of a nucleotide base
gtcttctnccgagtcntgcaata

SEQ ID NO: 10670 - DNA, 25 bp, synthetic construct
  source 1..25: mol_type = other DNA
  modified_base 7: mod_base = OTHER; note = A nucleoside-replacement group characterized by the lack of a nucleotide base
  modified_base 19: mod_base = OTHER; note = A nucleoside-replacement group characterized by the lack of a nucleotide base
atctacncttttatccatncacaca

SEQ ID NO: 10671 - DNA, 23 bp, synthetic construct
  source 1..23: mol_type = other DNA
  modified_base 8: mod_base = OTHER; note = A nucleoside-replacement group characterized by the lack of a nucleotide base
  modified_base 16: mod_base = OTHER; note = A nucleoside-replacement group characterized by the lack of a nucleotide base
ctactctnttatccanccacaca

SEQ ID NO: 10672 - DNA, 25 bp, synthetic construct
  source 1..25: mol_type = other DNA
  modified_base 9: mod_base = OTHER; note = A nucleoside-replacement group characterized by the lack of a nucleotide base
  modified_base 19: mod_base = OTHER; note = A nucleoside-replacement group characterized by the lack of a nucleotide base
atctactcntttatccatncacaca

SEQ ID NO: 10673 - DNA, 23 bp, synthetic construct
  source 1..23: mol_type = other DNA
  modified_base 8: mod_base = OTHER; note = A nucleoside-replacement group characterized by the lack of a nucleotide base
  modified_base 16: mod_base = OTHER; note = A nucleoside-replacement group characterized by the lack of a nucleotide base
ctttcagnaattcaancacacat

SEQ ID NO: 10674 - DNA, 23 bp, synthetic construct
  source 1..23: mol_type = other DNA
  modified_base 8: mod_base = OTHER; note = A nucleoside-replacement group characterized by the lack of a nucleotide base
  modified_base 16: mod_base = OTHER; note = A nucleoside-replacement group characterized by the lack of a nucleotide base
ctcttttntccatccncacaccc

SEQ ID NO: 10675 - DNA, 23 bp, synthetic construct
  source 1..23: mol_type = other DNA
  modified_base 8: mod_base = OTHER; note = A nucleoside-replacement group characterized by the lack of a nucleotide base
  modified_base 16: mod_base = OTHER; note = A nucleoside-replacement group characterized by the lack of a nucleotide base
tcttttanccatccanacaccca

SEQ ID NO: 10676 - DNA, 23 bp, synthetic construct
  source 1..23: mol_type = other DNA
  modified_base 8: mod_base = OTHER; note = A nucleoside-replacement group characterized by the lack of a nucleotide base
  modified_base 16: mod_base = OTHER; note = A nucleoside-replacement group characterized by the lack of a nucleotide base
tgcaatanttcaaccncacatcc

SEQ ID NO: 10677 - DNA, 25 bp, synthetic construct
  source 1..25: mol_type = other DNA
  modified_base 7: mod_base = OTHER; note = A nucleoside-replacement group characterized by the lack of a nucleotide base
  modified_base 19: mod_base = OTHER; note = A nucleoside-replacement group characterized by the lack of a nucleotide base
ctctttnatccatccacanacccac

SEQ ID NO: 10678 - DNA, 23 bp, synthetic construct
  source 1..23: mol_type = other DNA
  modified_base 8: mod_base = OTHER; note = A nucleoside-replacement group characterized by the lack of a nucleotide base
  modified_base 16: mod_base = OTHER; note = A nucleoside-replacement group characterized by the lack of a nucleotide base
cagtaatncaaccacncatccat

SEQ ID NO: 10679 - DNA, 25 bp, synthetic construct
  source 1..25: mol_type = other DNA
  modified_base 9: mod_base = OTHER; note = A nucleoside-replacement group characterized by the lack of a nucleotide base
  modified_base 19: mod_base = OTHER; note = A nucleoside-replacement group characterized by the lack of a nucleotide base
ctcttttanccatccacanacccac

SEQ ID NO: 10680 - DNA, 23 bp, synthetic construct
  source 1..23: mol_type = other DNA
  modified_base 8: mod_base = OTHER; note = A nucleoside-replacement group characterized by the lack of a nucleotide base
  modified_base 16: mod_base = OTHER; note = A nucleoside-replacement group characterized by the lack of a nucleotide base
cttttatncatccacncacccac

SEQ ID NO: 10681 - DNA, 25 bp, synthetic construct
  source 1..25: mol_type = other DNA
  modified_base 9: mod_base = OTHER; note = A nucleoside-replacement group characterized by the lack of a nucleotide base
  modified_base 19: mod_base = OTHER; note = A nucleoside-replacement group characterized by the lack of a nucleotide base
acctttcantaattcaacnacacat

SEQ ID NO: 10682 - DNA, 23 bp, synthetic construct
  source 1..23: mol_type = other DNA
  modified_base 8: mod_base = OTHER; note = A nucleoside-replacement group characterized by the lack of a nucleotide base
  modified_base 16: mod_base = OTHER; note = A nucleoside-replacement group characterized by the lack of a nucleotide base
agtaattnaaccacanatccatc

SEQ ID NO: 10683 - DNA, 23 bp, synthetic construct
  source 1..23: mol_type = other DNA
  modified_base 8: mod_base = OTHER; note = A nucleoside-replacement group characterized by the lack of a nucleotide base
  modified_base 16: mod_base = OTHER; note = A nucleoside-replacement group characterized by the lack of a nucleotide base
tctactcntttatccntccacac

SEQ ID NO: 10684 - DNA, 25 bp, synthetic construct
  source 1..25: mol_type = other DNA
  modified_base 7: mod_base = OTHER; note = A nucleoside-replacement group characterized by the lack of a nucleotide base
  modified_base 19: mod_base = OTHER; note = A nucleoside-replacement group characterized by the lack of a nucleotide base
cttgcantagttcaaccanacatcc

SEQ ID NO: 10685 - DNA, 23 bp, synthetic construct
  source 1..23: mol_type = other DNA
  modified_base 8: mod_base = OTHER; note = A nucleoside-replacement group characterized by the lack of a nucleotide base
  modified_base 16: mod_base = OTHER; note = A nucleoside-replacement group characterized by the lack of a nucleotide base
atctactnttttatcnatccaca

SEQ ID NO: 10686 - DNA, 23 bp, synthetic construct
  source 1..23: mol_type = other DNA
  modified_base 8: mod_base = OTHER; note = A nucleoside-replacement group characterized by the lack of a nucleotide base
  modified_base 16: mod_base = OTHER; note = A nucleoside-replacement group characterized by the lack of a nucleotide base
acctttcngtaattcnaccacac

SEQ ID NO: 10687 - DNA, 23 bp, synthetic construct
  source 1..23: mol_type = other DNA
  modified_base 8: mod_base = OTHER; note = A nucleoside-replacement group characterized by the lack of a nucleotide base
  modified_base 16: mod_base = OTHER; note = A nucleoside-replacement group characterized by the lack of a nucleotide base
cttgcaanagttcaancacacat

SEQ ID NO: 10688 - DNA, 25 bp, synthetic construct
  source 1..25: mol_type = other DNA
  modified_base 9: mod_base = OTHER; note = A nucleoside-replacement group characterized by the lack of a nucleotide base
  modified_base 19: mod_base = OTHER; note = A nucleoside-replacement group characterized by the lack of a nucleotide base
cagtaattnaaccacacanccatcc

SEQ ID NO: 10689 - DNA, 23 bp, synthetic construct
  source 1..23: mol_type = other DNA
  modified_base 8: mod_base = OTHER; note = A nucleoside-replacement group characterized by the lack of a nucleotide base
  modified_base 16: mod_base = OTHER; note = A nucleoside-replacement group characterized by the lack of a nucleotide base
gtaattcnaccacacntccatcc

SEQ ID NO: 10690 - DNA, 25 bp, synthetic construct
  source 1..25: mol_type = other DNA
  modified_base 7: mod_base = OTHER; note = A nucleoside-replacement group characterized by the lack of a nucleotide base
  modified_base 19: mod_base = OTHER; note = A nucleoside-replacement group characterized by the lack of a nucleotide base
acacatncatccatccatncattca

SEQ ID NO: 10691 - DNA, 23 bp, synthetic construct
  source 1..23: mol_type = other DNA
  modified_base 8: mod_base = OTHER; note = A nucleoside-replacement group characterized by the lack of a nucleotide base
  modified_base 16: mod_base = OTHER; note = A nucleoside-replacement group characterized by the lack of a nucleotide base
ttgcaatngttcaacnacacatc

SEQ ID NO: 10692 - DNA, 23 bp, synthetic construct
  source 1..23: mol_type = other DNA
  modified_base 8: mod_base = OTHER; note = A nucleoside-replacement group characterized by the lack of a nucleotide base
  modified_base 16: mod_base = OTHER; note = A nucleoside-replacement group characterized by the lack of a nucleotide base
acatccanccatccanccattca

SEQ ID NO: 10693 - DNA, 25 bp, synthetic construct
  source 1..25: mol_type = other DNA
  modified_base 7: mod_base = OTHER; note = A nucleoside-replacement group characterized by the lack of a nucleotide base
  modified_base 19: mod_base = OTHER; note = A nucleoside-replacement group characterized by the lack of a nucleotide base
acctttnagtaattcaacnacacat

SEQ ID NO: 10694 - DNA, 25 bp, synthetic construct
  source 1..25: mol_type = other DNA
  modified_base 9: mod_base = OTHER; note = A nucleoside-replacement group characterized by the lack of a nucleotide base
  modified_base 19: mod_base = OTHER; note = A nucleoside-replacement group characterized by the lack of a nucleotide base
agttcaacnacacatcctnccattc

SEQ ID NO: 10695 - DNA, 23 bp, synthetic construct
  source 1..23: mol_type = other DNA
  modified_base 8: mod_base = OTHER; note = A nucleoside-replacement group characterized by the lack of a nucleotide base
  modified_base 16: mod_base = OTHER; note = A nucleoside-replacement group characterized by the lack of a nucleotide base
acacatcnatccatcnatccatt

SEQ ID NO: 10696 - DNA, 23 bp, synthetic construct
  source 1..23: mol_type = other DNA
  modified_base 8: mod_base = OTHER; note = A nucleoside-replacement group characterized by the lack of a nucleotide base
  modified_base 16: mod_base = OTHER; note = A nucleoside-replacement group characterized by the lack of a nucleotide base
agttcaancacacatncttccat

SEQ ID NO: 10697 - DNA, 23 bp, synthetic construct
  source 1..23: mol_type = other DNA
  modified_base 8: mod_base = OTHER; note = A nucleoside-replacement group characterized by the lack of a nucleotide base
  modified_base 16: mod_base = OTHER; note = A nucleoside-replacement group characterized by the lack of a nucleotide base
cacatccntccatccntccattc

SEQ ID NO: 10698 - DNA, 23 bp, synthetic construct
  source 1..23: mol_type = other DNA
  modified_base 8: mod_base = OTHER; note = A nucleoside-replacement group characterized by the lack of a nucleotide base
  modified_base 16: mod_base = OTHER; note = A nucleoside-replacement group characterized by the lack of a nucleotide base
gttcaacnacacatcnttccatt

SEQ ID NO: 10699 - DNA, 25 bp, synthetic construct
  source 1..25: mol_type = other DNA
  modified_base 7: mod_base = OTHER; note = A nucleoside-replacement group characterized by the lack of a nucleotide base
  modified_base 19: mod_base = OTHER; note = A nucleoside-replacement group characterized by the lack of a nucleotide base
agttcanccacacatcctnccattc

SEQ ID NO: 10700 - DNA, 25 bp, synthetic construct
  source 1..25: mol_type = other DNA
  modified_base 7: mod_base = OTHER; note = A nucleoside-replacement group characterized by the lack of a nucleotide base
  modified_base 19: mod_base = OTHER; note = A nucleoside-replacement group characterized by the lack of a nucleotide base
cagtaantcaaccacacanccatcc

SEQ ID NO: 10701 - DNA, 23 bp, synthetic construct
  source 1..23: mol_type = other DNA
  modified_base 8: mod_base = OTHER; note = A nucleoside-replacement group characterized by the lack of a nucleotide base
  modified_base 16: mod_base = OTHER; note = A nucleoside-replacement group characterized by the lack of a nucleotide base
ttcaaccncacatccntccattc

SEQ ID NO: 10702 - DNA, 25 bp, synthetic construct
  source 1..25: mol_type = other DNA
  modified_base 9: mod_base = OTHER; note = A nucleoside-replacement group characterized by the lack of a nucleotide base
  modified_base 19: mod_base = OTHER; note = A nucleoside-replacement group characterized by the lack of a nucleotide base
cttgcaatngttcaaccanacatcc

SEQ ID NO: 10703 - DNA, 25 bp, synthetic construct
  source 1..25: mol_type = other DNA
  modified_base 9: mod_base = OTHER; note = A nucleoside-replacement group characterized by the lack of a nucleotide base
  modified_base 19: mod_base = OTHER; note = A nucleoside-replacement group characterized by the lack of a nucleotide base
acacatccntccatccatncattca

SEQ ID NO: 10704 - DNA, 23 bp, synthetic construct
  source 1..23: mol_type = other DNA
  modified_base 8: mod_base = OTHER; note = A nucleoside-replacement group characterized by the lack of a nucleotide base
  modified_base 16: mod_base = OTHER; note = A nucleoside-replacement group characterized by the lack of a nucleotide base
cctttcantaattcanccacaca

SEQ ID NO: 10705 - DNA, 23 bp, synthetic construct
  source 1..23: mol_type = other DNA
  modified_base 8: mod_base = OTHER; note = A nucleoside-replacement group characterized by the lack of a nucleotide base
  modified_base 16: mod_base = OTHER; note = A nucleoside-replacement group characterized by the lack of a nucleotide base
gagacatncccagacncaaacgg

SEQ ID NO: 10706 - DNA, 23 bp, synthetic construct
  source 1..23: mol_type = other DNA
  modified_base 8: mod_base = OTHER; note = A nucleoside-replacement group characterized by the lack of a nucleotide base
  modified_base 16: mod_base = OTHER; note = A nucleoside-replacement group characterized by the lack of a nucleotide base
gacatacncagacacnaacggcc

SEQ ID NO: 10707 - DNA, 23 bp, synthetic construct
  source 1..23: mol_type = other DNA
  modified_base 8: mod_base = OTHER; note = A nucleoside-replacement group characterized by the lack of a nucleotide base
  modified_base 16: mod_base = OTHER; note = A nucleoside-replacement group characterized by the lack of a nucleotide base
agacatanccagacanaaacggc

SEQ ID NO: 10708 - DNA, 23 bp, synthetic construct
  source 1..23: mol_type = other DNA
  modified_base 8: mod_base = OTHER; note = A nucleoside-replacement group characterized by the lack of a nucleotide base
  modified_base 16: mod_base = OTHER; note = A nucleoside-replacement group characterized by the lack of a nucleotide base
gagacatncccagacncaaacgg

SEQ ID NO: 10709 - DNA, 23 bp, synthetic construct
  source 1..23: mol_type = other DNA
  modified_base 8: mod_base = OTHER; note = A nucleoside-replacement group characterized by the lack of a nucleotide base
  modified_base 16: mod_base = OTHER; note = A nucleoside-replacement group characterized by the lack of a nucleotide base
gacatacncagacacnaacggcc

SEQ ID NO: 10710 - DNA, 23 bp, synthetic construct
  source 1..23: mol_type = other DNA
  modified_base 8: mod_base = OTHER; note = A nucleoside-replacement group characterized by the lack of a nucleotide base
  modified_base 16: mod_base = OTHER; note = A nucleoside-replacement group characterized by the lack of a nucleotide base
agacatanccagacanaaacggc

SEQ ID NO: 10711 - DNA, 23 bp, synthetic construct
  source 1..23: mol_type = other DNA
  modified_base 8: mod_base = OTHER; note = A nucleoside-replacement group characterized by the lack of a nucleotide base
  modified_base 16: mod_base = OTHER; note = A nucleoside-replacement group characterized by the lack of a nucleotide base
agacatanccagacanaaacggc

SEQ ID NO: 10712 - DNA, 23 bp, synthetic construct
  source 1..23: mol_type = other DNA
  modified_base 8: mod_base = OTHER; note = A nucleoside-replacement group characterized by the lack of a nucleotide base
  modified_base 16: mod_base = OTHER; note = A nucleoside-replacement group characterized by the lack of a nucleotide base
gacatacncagacacnaacggcc

SEQ ID NO: 10713 - DNA, 23 bp, synthetic construct
  source 1..23: mol_type = other DNA
  modified_base 8: mod_base = OTHER; note = A nucleoside-replacement group characterized by the lack of a nucleotide base
  modified_base 16: mod_base = OTHER; note = A nucleoside-replacement group characterized by the lack of a nucleotide base
gagacatncccagacncaaacgg

SEQ ID NO: 10714 - DNA, 25 bp, synthetic construct
  source 1..25: mol_type = other DNA
  modified_base 9: mod_base = OTHER; note = A nucleoside-replacement group characterized by the lack of a nucleotide base
  modified_base 19: mod_base = OTHER; note = A nucleoside-replacement group characterized by the lack of a nucleotide base
gagacatanccagacacanacggcc

SEQ ID NO: 10715 - DNA, 25 bp, synthetic construct
  source 1..25: mol_type = other DNA
  modified_base 7: mod_base = OTHER; note = A nucleoside-replacement group characterized by the lack of a nucleotide base
  modified_base 19: mod_base = OTHER; note = A nucleoside-replacement group characterized by the lack of a nucleotide base
gagacanacccagacacanacggcc

SEQ ID NO: 10716 - DNA, 23 bp, synthetic construct
  source 1..23: mol_type = other DNA
  modified_base 8: mod_base = OTHER; note = A nucleoside-replacement group characterized by the lack of a nucleotide base
  modified_base 16: mod_base = OTHER; note = A nucleoside-replacement group characterized by the lack of a nucleotide base
aagagacntacccagncacaaac

SEQ ID NO: 10717 - DNA, 23 bp, synthetic construct
  source 1..23: mol_type = other DNA
  modified_base 8: mod_base = OTHER; note = A nucleoside-replacement group characterized by the lack of a nucleotide base
  modified_base 16: mod_base = OTHER; note = A nucleoside-replacement group characterized by the lack of a nucleotide base
agagacanacccaganacaaacg

SEQ ID NO: 10718 - DNA, 23 bp, synthetic construct
  source 1..23: mol_type = other DNA
  modified_base 8: mod_base = OTHER; note = A nucleoside-replacement group characterized by the lack of a nucleotide base
  modified_base 16: mod_base = OTHER; note = A nucleoside-replacement group characterized by the lack of a nucleotide base
gaagaganatacccanacacaaa

SEQ ID NO: 10719 - DNA, 25 bp, synthetic construct
  source 1..25: mol_type = other DNA
  modified_base 9: mod_base = OTHER; note = A nucleoside-replacement group characterized by the lack of a nucleotide base
  modified_base 19: mod_base = OTHER; note = A nucleoside-replacement group characterized by the lack of a nucleotide base
gaagagacntacccagacncaaacg

SEQ ID NO: 10720 - DNA, 25 bp, synthetic construct
  source 1..25: mol_type = other DNA
  modified_base 7: mod_base = OTHER; note = A nucleoside-replacement group characterized by the lack of a nucleotide base
  modified_base 19: mod_base = OTHER; note = A nucleoside-replacement group characterized by the lack of a nucleotide base
gaagagncatacccagacncaaacg

SEQ ID NO: 10721 - DNA, 23 bp, synthetic construct
  source 1..23: mol_type = other DNA
  modified_base 8: mod_base = OTHER; note = A nucleoside-replacement group characterized by the lack of a nucleotide base
  modified_base 16: mod_base = OTHER; note = A nucleoside-replacement group characterized by the lack of a nucleotide base
cagctggnagagacanacccaga

SEQ ID NO: 10722 - DNA, 23 bp, synthetic construct
  source 1..23: mol_type = other DNA
  modified_base 8: mod_base = OTHER; note = A nucleoside-replacement group characterized by the lack of a nucleotide base
  modified_base 16: mod_base = OTHER; note = A nucleoside-replacement group characterized by the lack of a nucleotide base
agctggangagacatncccagac

SEQ ID NO: 10723 - DNA, 23 bp, synthetic construct
  source 1..23: mol_type = other DNA
  modified_base 8: mod_base = OTHER; note = A nucleoside-replacement group characterized by the lack of a nucleotide base
  modified_base 16: mod_base = OTHER; note = A nucleoside-replacement group characterized by the lack of a nucleotide base
gcagctgnaagagacntacccag

SEQ ID NO: 10724 - DNA, 23 bp, synthetic construct
  source 1..23: mol_type = other DNA
  modified_base 8: mod_base = OTHER; note = A nucleoside-replacement group characterized by the lack of a nucleotide base
  modified_base 16: mod_base = OTHER; note = A nucleoside-replacement group characterized by the lack of a nucleotide base
ggcagctngaagaganataccca

SEQ ID NO: 10725 - DNA, 23 bp, synthetic construct
  source 1..23: mol_type = other DNA
  modified_base 8: mod_base = OTHER; note = A nucleoside-replacement group characterized by the lack of a nucleotide base
  modified_base 16: mod_base = OTHER; note = A nucleoside-replacement group characterized by the lack of a nucleotide base
aggcagcnggaagagncataccc

SEQ ID NO: 10726 - DNA, 25 bp, synthetic construct
  source 1..25: mol_type = other DNA
  modified_base 9: mod_base = OTHER; note = A nucleoside-replacement group characterized by the lack of a nucleotide base
  modified_base 19: mod_base = OTHER; note = A nucleoside-replacement group characterized by the lack of a nucleotide base
aggcagctngaagagacanacccag

SEQ ID NO: 10727 - DNA, 25 bp, synthetic construct
  source 1..25: mol_type = other DNA
  modified_base 7: mod_base = OTHER; note = A nucleoside-replacement group characterized by the lack of a nucleotide base
  modified_base 19: mod_base = OTHER; note = A nucleoside-replacement group characterized by the lack of a nucleotide base
aggcagntggaagagacanacccag

SEQ ID NO: 10728 - DNA, 23 bp, synthetic construct
  source 1..23: mol_type = other DNA
  modified_base 8: mod_base = OTHER; note = A nucleoside-replacement group characterized by the lack of a nucleotide base
  modified_base 16: mod_base = OTHER; note = A nucleoside-replacement group characterized by the lack of a nucleotide base
gttctttncaggaaanccaggca

SEQ ID NO: 10729 - DNA, 23 bp, synthetic construct
  source 1..23: mol_type = other DNA
  modified_base 8: mod_base = OTHER; note = A nucleoside-replacement group characterized by the lack of a nucleotide base
  modified_base 16: mod_base = OTHER; note = A nucleoside-replacement group characterized by the lack of a nucleotide base
ttctttcnaggaaacncaggcag

SEQ ID NO: 10730 - DNA, 25 bp, synthetic construct
  source 1..25: mol_type = other DNA
  modified_base 9: mod_base = OTHER; note = A nucleoside-replacement group characterized by the lack of a nucleotide base
  modified_base 19: mod_base = OTHER; note = A nucleoside-replacement group characterized by the lack of a nucleotide base
gttctttcnaggaaacccnggcagc

SEQ ID NO: 10731 - DNA, 25 bp, synthetic construct
  source 1..25: mol_type = other DNA
  modified_base 7: mod_base = OTHER; note = A nucleoside-replacement group characterized by the lack of a nucleotide base
  modified_base 19: mod_base = OTHER; note = A nucleoside-replacement group characterized by the lack of a nucleotide base
gttcttnccaggaaacccnggcagc

SEQ ID NO: 10732 - DNA, 15 bp, synthetic construct
  source 1..15: mol_type = other DNA
tctttccaggaaacc

SEQ ID NO: 10733 - DNA, 15 bp, synthetic construct
  source 1..15: mol_type = other DNA
caggaaacccaggca

SEQ ID NO: 10734 - DNA, 16 bp, synthetic construct
  source 1..16: mol_type = other DNA
tctttccaggaaaccc

SEQ ID NO: 10735 - DNA, 16 bp, synthetic construct
  source 1..16: mol_type = other DNA
ccaggaaacccaggca

SEQ ID NO: 10736 - DNA, 17 bp, synthetic construct
  source 1..17: mol_type = other DNA
tctttccaggaaaccca

SEQ ID NO: 10737 - DNA, 17 bp, synthetic construct
  source 1..17: mol_type = other DNA
tccaggaaacccaggca

SEQ ID NO: 10738 - DNA, 18 bp, synthetic construct
  source 1..18: mol_type = other DNA
tctttccaggaaacccag

SEQ ID NO: 10739 - DNA, 18 bp, synthetic construct
  source 1..18: mol_type = other DNA
ttccaggaaacccaggca

SEQ ID NO: 10740 - DNA, 19 bp, synthetic construct
  source 1..19: mol_type = other DNA
tctttccaggaaacccagg

SEQ ID NO: 10741 - DNA, 19 bp, synthetic construct
  source 1..19: mol_type = other DNA
tttccaggaaacccaggca

SEQ ID NO: 10742 - DNA, 20 bp, synthetic construct
  source 1..20: mol_type = other DNA
tctttccaggaaacccaggc

SEQ ID NO: 10743 - DNA, 20 bp, synthetic construct
  source 1..20: mol_type = other DNA
ctttccaggaaacccaggca

SEQ ID NO: 10744 - DNA, 23 bp, synthetic construct
  source 1..23: mol_type = other DNA
  modified_base 8: mod_base = OTHER; note = A nucleoside-replacement group characterized by the lack of a nucleotide base
  modified_base 16: mod_base = OTHER; note = A nucleoside-replacement group characterized by the lack of a nucleotide base
gagttctntccagganacccagg

SEQ ID NO: 10745-10754 - skipped (10 entries)

SEQ ID NO: 10755 - DNA, 23 bp, synthetic construct
  source 1..23: mol_type = other DNA
  modified_base 8: mod_base = OTHER; note = A nucleoside-replacement group characterized by the lack of a nucleotide base
  modified_base 16: mod_base = OTHER; note = A nucleoside-replacement group characterized by the lack of a nucleotide base
agttcttnccaggaancccaggc

SEQ ID NO: 10756 - DNA, 23 bp, synthetic construct
  source 1..23: mol_type = other DNA
  modified_base 8: mod_base = OTHER; note = A nucleoside-replacement group characterized by the lack of a nucleotide base
  modified_base 16: mod_base = OTHER; note = A nucleoside-replacement group characterized by the lack of a nucleotide base
agagttcnttccaggnaacccag

SEQ ID NO: 10757 - DNA, 25 bp, synthetic construct
  source 1..25: mol_type = other DNA
  modified_base 9: mod_base = OTHER; note = A nucleoside-replacement group characterized by the lack of a nucleotide base
  modified_base 19: mod_base = OTHER; note = A nucleoside-replacement group characterized by the lack of a nucleotide base
agagttctntccaggaaanccaggc

SEQ ID NO: 10758 - DNA, 25 bp, synthetic construct
  source 1..25: mol_type = other DNA
  modified_base 7: mod_base = OTHER; note = A nucleoside-replacement group characterized by the lack of a nucleotide base
  modified_base 19: mod_base = OTHER; note = A nucleoside-replacement group characterized by the lack of a nucleotide base
agagttntttccaggaaanccaggc

SEQ ID NO: 10759 - DNA, 23 bp, synthetic construct
  source 1..23: mol_type = other DNA
  modified_base 8: mod_base = OTHER; note = A nucleoside-replacement group characterized by the lack of a nucleotide base
  modified_base 16: mod_base = OTHER; note = A nucleoside-replacement group characterized by the lack of a nucleotide base
cacatccntccatccntccattc

SEQ ID NO: 10760 - DNA, 23 bp, synthetic construct
  source 1..23: mol_type = other DNA
  modified_base 8: mod_base = OTHER; note = A nucleoside-replacement group characterized by the lack of a nucleotide base
  modified_base 16: mod_base = OTHER; note = A nucleoside-replacement group characterized by the lack of a nucleotide base
acacatcnatccatcnatccatt

SEQ ID NO: 10761 - DNA, 23 bp, synthetic construct
  source 1..23: mol_type = other DNA
  modified_base 8: mod_base = OTHER; note = A nucleoside-replacement group characterized by the lack of a nucleotide base
  modified_base 16: mod_base = OTHER; note = A nucleoside-replacement group characterized by the lack of a nucleotide base
acatccanccatccanccattca

SEQ ID NO: 10762 - DNA, 23 bp, synthetic construct
  source 1..23: mol_type = other DNA
  modified_base 8: mod_base = OTHER; note = A nucleoside-replacement group characterized by the lack of a nucleotide base
  modified_base 16: mod_base = OTHER; note = A nucleoside-replacement group characterized by the lack of a nucleotide base
cacatccntccatccntccattc

SEQ ID NO: 10763 - DNA, 23 bp, synthetic construct
  source 1..23: mol_type = other DNA
  modified_base 8: mod_base = OTHER; note = A nucleoside-replacement group characterized by the lack of a nucleotide base
  modified_base 16: mod_base = OTHER; note = A nucleoside-replacement group characterized by the lack of a nucleotide base
acacatcnatccatcnatccatt

SEQ ID NO: 10764 - DNA, 23 bp, synthetic construct
  source 1..23: mol_type = other DNA
  modified_base 8: mod_base = OTHER; note = A nucleoside-replacement group characterized by the lack of a nucleotide base
  modified_base 16: mod_base = OTHER; note = A nucleoside-replacement group characterized by the lack of a nucleotide base
acatccanccatccanccattca

SEQ ID NO: 10765 - DNA, 25 bp, synthetic construct
  source 1..25: mol_type = other DNA
  modified_base 7: mod_base = OTHER; note = A nucleoside-replacement group characterized by the lack of a nucleotide base
  modified_base 19: mod_base = OTHER; note = A nucleoside-replacement group characterized by the lack of a nucleotide base
gcagctngaagagacatanccagac

SEQ ID NO: 10766 - DNA, 25 bp, synthetic construct
  source 1..25: mol_type = other DNA
  modified_base 7: mod_base = OTHER; note = A nucleoside-replacement group characterized by the lack of a nucleotide base
  modified_base 19: mod_base = OTHER; note = A nucleoside-replacement group characterized by the lack of a nucleotide base
gcagctngaagagacatanccagac

SEQ ID NO: 10767 - DNA, 25 bp, synthetic construct
  source 1..25: mol_type = other DNA
  modified_base 7: mod_base = OTHER; note = A nucleoside-replacement group characterized by the lack of a nucleotide base
  modified_base 19: mod_base = OTHER; note = A nucleoside-replacement group characterized by the lack of a nucleotide base
gcagctngaagagacatanccagac

SEQ ID NO: 10768 - DNA, 25 bp, synthetic construct
  source 1..25: mol_type = other DNA
  modified_base 7: mod_base = OTHER; note = A nucleoside-replacement group characterized by the lack of a nucleotide base
  modified_base 19: mod_base = OTHER; note = A nucleoside-replacement group characterized by the lack of a nucleotide base
gcagctngaagagacatanccagac

SEQ ID NO: 10769 - DNA, 25 bp, synthetic construct
  source 1..25: mol_type = other DNA
  modified_base 7: mod_base = OTHER; note = A nucleoside-replacement group characterized by the lack of a nucleotide base
  modified_base 19: mod_base = OTHER; note = A nucleoside-replacement group characterized by the lack of a nucleotide base
gcagctngaagagacatanccagac

SEQ ID NO: 10770 - DNA, 25 bp, synthetic construct
  source 1..25: mol_type = other DNA
  modified_base 9: mod_base = OTHER; note = A nucleoside-replacement group characterized by the lack of a nucleotide base
  modified_base 19: mod_base = OTHER; note = A nucleoside-replacement group characterized by the lack of a nucleotide base
gcagctggnagagacatanccagac

SEQ ID NO: 10771 - DNA, 25 bp, synthetic construct
  source 1..25: mol_type = other DNA
  modified_base 9: mod_base = OTHER; note = A nucleoside-replacement group characterized by the lack of a nucleotide base
  modified_base 19: mod_base = OTHER; note = A nucleoside-replacement group characterized by the lack of a nucleotide base
gcagctggnagagacatanccagac

SEQ ID NO: 10772 - DNA, 25 bp, synthetic construct
  source 1..25: mol_type = other DNA
  modified_base 9: mod_base = OTHER; note = A nucleoside-replacement group characterized by the lack of a nucleotide base
  modified_base 19: mod_base = OTHER; note = A nucleoside-replacement group characterized by the lack of a nucleotide base
gcagctggnagagacatanccagac

SEQ ID NO: 10773 - DNA, 25 bp, synthetic construct
  source 1..25: mol_type = other DNA
  modified_base 9: mod_base = OTHER; note = A nucleoside-replacement group characterized by the lack of a nucleotide base
  modified_base 19: mod_base = OTHER; note = A nucleoside-replacement group characterized by the lack of a nucleotide base
gcagctggnagagacatanccagac

SEQ ID NO: 10774 - DNA, 25 bp, synthetic construct
  source 1..25: mol_type = other DNA
  modified_base 9: mod_base = OTHER; note = A nucleoside-replacement group characterized by the lack of a nucleotide base
  modified_base 19: mod_base = OTHER; note = A nucleoside-replacement group characterized by the lack of a nucleotide base
gcagctggnagagacatanccagac

SEQ ID NO: 10775 - DNA, 23 bp, synthetic construct
  source 1..23: mol_type = other DNA
  modified_base 8: mod_base = OTHER; note = A nucleoside-replacement group characterized by the lack of a nucleotide base
  modified_base 16: mod_base = OTHER; note = A nucleoside-replacement group characterized by the lack of a nucleotide base
gttctttncaggaaanccaggca

SEQ ID NO: 10776 - DNA, 23 bp, synthetic construct
  source 1..23: mol_type = other DNA
  modified_base 8: mod_base = OTHER; note = A nucleoside-replacement group characterized by the lack of a nucleotide base
  modified_base 16: mod_base = OTHER; note = A nucleoside-replacement group characterized by the lack of a nucleotide base
gttctttncaggaaanccaggca

SEQ ID NO: 10777 - DNA, 23 bp, synthetic construct
  source 1..23: mol_type = other DNA
  modified_base 8: mod_base = OTHER; note = A nucleoside-replacement group characterized by the lack of a nucleotide base
  modified_base 16: mod_base = OTHER; note = A nucleoside-replacement group characterized by the lack of a nucleotide base
gttctttncaggaaanccaggca

SEQ ID NO: 10778 - DNA, 23 bp, synthetic construct
  source 1..23: mol_type = other DNA
  modified_base 8: mod_base = OTHER; note = A nucleoside-replacement group characterized by the lack of a nucleotide base
  modified_base 16: mod_base = OTHER; note = A nucleoside-replacement group characterized by the lack of a nucleotide base
gttctttncaggaaanccaggca

SEQ ID NO: 10779 - DNA, 23 bp, synthetic construct
  source 1..23: mol_type = other DNA
  modified_base 8: mod_base = OTHER; note = A nucleoside-replacement group characterized by the lack of a nucleotide base
  modified_base 16: mod_base = OTHER; note = A nucleoside-replacement group characterized by the lack of a nucleotide base
gttctttncaggaaanccaggca

SEQ ID NO: 10780 - DNA, 18 bp, synthetic construct
  source 1..18: mol_type = other DNA
attgttctgcacgtcggt

SEQ ID NO: 10781 - DNA, 21 bp, synthetic construct
  source 1..21: mol_type = other DNA
gtctgggtatgtctcttccag

SEQ ID NO: 10782 - DNA, 24 bp, synthetic construct
  source 1..24: mol_type = other DNA
agttctttccaggaaacccaggca

SEQ ID NO: 10783 - DNA, 23 bp, synthetic construct
  source 1..23: mol_type = other DNA
  modified_base 8: mod_base = OTHER; note = A nucleoside-replacement group characterized by the lack of a nucleotide base
  modified_base 16: mod_base = OTHER; note = A nucleoside-replacement group characterized by the lack of a nucleotide base
gattcacnttcataangctggca

SEQ ID NO: 10784 - DNA, 23 bp, synthetic construct
  source 1..23: mol_type = other DNA
  modified_base 8: mod_base = OTHER; note = A nucleoside-replacement group characterized by the lack of a nucleotide base
  modified_base 16: mod_base = OTHER; note = A nucleoside-replacement group characterized by the lack of a nucleotide base
attcactntcataatnctggcag

SEQ ID NO: 10785 - DNA, 18 bp, synthetic construct
  source 1..18: mol_type = other DNA
tcactttcataatgctgg

SEQ ID NO: 10786 - DNA, 18 bp, synthetic construct
  source 1..18: mol_type = other DNA
  modified_base 9: mod_base = OTHER; note = A nucleoside-replacement group characterized by the lack of a nucleotide base
tcactttcntaatgctgg

SEQ ID NO: 10787 - DNA, 18 bp, synthetic construct
  source 1..18: mol_type = other DNA
  modified_base 10: mod_base = OTHER; note = A nucleoside-replacement group characterized by the lack of a nucleotide base
tcactttcanaatgctgg

SEQ ID NO: 10788 - DNA, 18 bp, synthetic construct
  source 1..18: mol_type = other DNA
  modified_base 9: mod_base = OTHER; note = A nucleoside-replacement group characterized by the lack of a nucleotide base
  modified_base 10: mod_base = OTHER; note = A nucleoside-replacement group characterized by the lack of a nucleotide base
tcactttcnnaatgctgg

SEQ ID NO: 10789 - DNA, 23 bp, synthetic construct
  source 1..23: mol_type = other DNA
gattcactttcataatgctggca

SEQ ID NO: 10790 - DNA, 23 bp, synthetic construct
  source 1..23: mol_type = other DNA
gattcactttcataatgctggca

SEQ ID NO: 10791 - DNA, 23 bp, synthetic construct
  source 1..23: mol_type = other DNA
gattcactttcataatgctggca

SEQ ID NO: 10792 - DNA, 23 bp, synthetic construct
  source 1..23: mol_type = other DNA
gattcactttcataatgctggca

SEQ ID NO: 10793 - DNA, 23 bp, synthetic construct
  source 1..23: mol_type = other DNA
gattcactttcataatgctggca

SEQ ID NO: 10794 - DNA, 23 bp, synthetic construct
  source 1..23: mol_type = other DNA
  modified_base 8: mod_base = OTHER; note = A nucleoside-replacement group characterized by the lack of a nucleotide base
  modified_base 16: mod_base = OTHER; note = A nucleoside-replacement group characterized by the lack of a nucleotide base
gattcacnttcataangctggca

SEQ ID NO: 10795 - DNA, 23 bp, synthetic construct
  source 1..23: mol_type = other DNA
  modified_base 8: mod_base = OTHER; note = A nucleoside-replacement group characterized by the lack of a nucleotide base
  modified_base 16: mod_base = OTHER; note = A nucleoside-replacement group characterized by the lack of a nucleotide base
gattcacnttcataangctggca

SEQ ID NO: 10796 - DNA, 23 bp, synthetic construct
  source 1..23: mol_type = other DNA
  modified_base 8: mod_base = OTHER; note = A nucleoside-replacement group characterized by the lack of a nucleotide base
  modified_base 16: mod_base = OTHER; note = A nucleoside-replacement group characterized by the lack of a nucleotide base
gattcacnttcataangctggca

SEQ ID NO: 10797 - DNA, 23 bp, synthetic construct
  source 1..23: mol_type = other DNA
  modified_base 8: mod_base = OTHER; note = A nucleoside-replacement group characterized by the lack of a nucleotide base
  modified_base 16: mod_base = OTHER; note = A nucleoside-replacement group characterized by the lack of a nucleotide base
gattcacnttcataangctggca

SEQ ID NO: 10798 - DNA, 23 bp, synthetic construct
  source 1..23: mol_type = other DNA
  modified_base 8: mod_base = OTHER; note = A nucleoside-replacement group characterized by the lack of a nucleotide base
  modified_base 16: mod_base = OTHER; note = A nucleoside-replacement group characterized by the lack of a nucleotide base
gattcacnttcataangctggca

SEQ ID NO: 10799 - DNA, 23 bp, synthetic construct
  source 1..23: mol_type = other DNA
agattcactttcataatgctggc

SEQ ID NO: 10800 - DNA, 23 bp, synthetic construct
  source 1..23: mol_type = other DNA
agattcactttcataatgctggc

SEQ ID NO: 10801 - DNA, 23 bp, synthetic construct
  source 1..23: mol_type = other DNA
agattcactttcataatgctggc

SEQ ID NO: 10802 - DNA, 23 bp, synthetic construct
  source 1..23: mol_type = other DNA
agattcactttcataatgctggc

SEQ ID NO: 10803 - DNA, 23 bp, synthetic construct
  source 1..23: mol_type = other DNA
agattcactttcataatgctggc

SEQ ID NO: 10804 - DNA, 23 bp, synthetic construct
  source 1..23: mol_type = other DNA
  modified_base 8: mod_base = OTHER; note = A nucleoside-replacement group characterized by the lack of a nucleotide base
  modified_base 16: mod_base = OTHER; note = A nucleoside-replacement group characterized by the lack of a nucleotide base
agattcantttcatantgctggc

SEQ ID NO: 10805 - DNA, 23 bp, synthetic construct
  source 1..23: mol_type = other DNA
  modified_base 8: mod_base = OTHER; note = A nucleoside-replacement group characterized by the lack of a nucleotide base
  modified_base 16: mod_base = OTHER; note = A nucleoside-replacement group characterized by the lack of a nucleotide base
agattcantttcatantgctggc

SEQ ID NO: 10806 - DNA, 23 bp, synthetic construct
  source 1..23: mol_type = other DNA
  modified_base 8: mod_base = OTHER; note = A nucleoside-replacement group characterized by the lack of a nucleotide base
  modified_base 16: mod_base = OTHER; note = A nucleoside-replacement group characterized by the lack of a nucleotide base
agattcantttcatantgctggc

SEQ ID NO: 10807 - DNA, 23 bp, synthetic construct
  source 1..23: mol_type = other DNA
  modified_base 8: mod_base = OTHER; note = A nucleoside-replacement group characterized by the lack of a nucleotide base
  modified_base 16: mod_base = OTHER; note = A nucleoside-replacement group characterized by the lack of a nucleotide base
agattcantttcatantgctggc

SEQ ID NO: 10808 - DNA, 23 bp, synthetic construct
  source 1..23: mol_type = other DNA
  modified_base 8: mod_base = OTHER; note = A nucleoside-replacement group characterized by the lack of a nucleotide base
  modified_base 16: mod_base = OTHER; note = A nucleoside-replacement group characterized by the lack of a nucleotide base
agattcantttcatantgctggc

SEQ ID NO: 10809 - DNA, 18 bp, synthetic construct
  source 1..18: mol_type = other DNA
  misc_feature 1..18: note = Phosphorothioate linkage
  modified_base 1..18: mod_base = OTHER; note = 2'-O-(2-methoxyethyl) ribonucleotide
  modified_base 2: mod_base = OTHER; note = 5-methyl cytosine
  modified_base 4: mod_base = OTHER; note = 5-methyl cytosine
  modified_base 8: mod_base = OTHER; note = 5-methyl cytosine
  modified_base 15: mod_base = OTHER; note = 5-methyl cytosine
tcactttcataatgctgg

SEQ ID NO: 10810 - DNA, 27 bp, synthetic construct
  source 1..27: mol_type = other DNA
gctcacattccttaaattaaggagaaa

SEQ ID NO: 10811 - DNA, 24 bp, synthetic construct
  source 1..24: mol_type = other DNA
tccagatctgtctgatcgtttctt

SEQ ID NO: 10812 - DNA, 30 bp, synthetic construct
  source 1..30: mol_type = other DNA
ctggcatagagcagcactaaatgacaccac

SEQ ID NO: 10813 - DNA, 28 bp, synthetic construct
  source 1..28: mol_type = other DNA
tggctatcatactggctattatatggaa

SEQ ID NO: 10814 - DNA, 21 bp, synthetic construct
  source 1..21: mol_type = other DNA
tctttccaggaaacccaggca

SEQ ID NO: 10815 - DNA, 23 bp, synthetic construct
  source 1..23: mol_type = other DNA
  modified_base 8: mod_base = OTHER; note = A nucleoside-replacement group characterized by the lack of a nucleotide base
  modified_base 16: mod_base = OTHER; note = A nucleoside-replacement group characterized by the lack of a nucleotide base
tctctcgnacacacgnacacatg

SEQ ID NO: 10816 - DNA, 23 bp, synthetic construct
  source 1..23: mol_type = other DNA
  modified_base 8: mod_base = OTHER; note = A nucleoside-replacement group characterized by the lack of a nucleotide base
  modified_base 16: mod_base = OTHER; note = A nucleoside-replacement group characterized by the lack of a nucleotide base
tctctcgnacacacgnacacatg

SEQ ID NO: 10817 - DNA, 23 bp, synthetic construct
  source 1..23: mol_type = other DNA
  modified_base 8: mod_base = OTHER; note = A nucleoside-replacement group characterized by the lack of a nucleotide base
  modified_base 16: mod_base = OTHER; note = A nucleoside-replacement group characterized by the lack of a nucleotide base
gtcttctnccgagtcntgcaata

SEQ ID NO: 10818 - DNA, 23 bp, synthetic construct
  source 1..23: mol_type = other DNA
  modified_base 8: mod_base = OTHER; note = A nucleoside-replacement group characterized by the lack of a nucleotide base
  modified_base 16: mod_base = OTHER; note = A nucleoside-replacement group characterized by the lack of a nucleotide base
gtcttctnccgagtcntgcaata

SEQ ID NO: 10819 - DNA, 23 bp, synthetic construct
  source 1..23: mol_type = other DNA
  modified_base 8: mod_base = OTHER; note = A nucleoside-replacement group characterized by the lack of a nucleotide base
  modified_base 16: mod_base = OTHER; note = A nucleoside-replacement group characterized by the lack of a nucleotide base
ctttctcncgaaggtnttctgcc

SEQ ID NO: 10820 - DNA, 23 bp, synthetic construct
  source 1..23: mol_type = other DNA
  modified_base 8: mod_base = OTHER; note = A nucleoside-replacement group characterized by the lack of a nucleotide base
  modified_base 16: mod_base = OTHER; note = A nucleoside-replacement group characterized by the lack of a nucleotide base
ctttctcncgaaggtnttctgcc

SEQ ID NO: 10821 - DNA, 17 bp, synthetic construct
  source 1..17: mol_type = other DNA
ggatgatccgcatggac

SEQ ID NO: 10822 - DNA, 19 bp, synthetic construct
  source 1..19: mol_type = other DNA
ccttctctgccaagtacac

SEQ ID NO: 10823 - DNA, 24 bp, synthetic construct
  source 1..24: mol_type = other DNA
aggccaggatgagacaaaggaagc

SEQ ID NO: 10824 - DNA, 21 bp, synthetic construct
  source 1..21: mol_type = other DNA
gtcctgcaatatgaatataat

SEQ ID NO: 10825 - DNA, 23 bp, synthetic construct
  source 1..23: mol_type = other DNA
  modified_base 8: mod_base = OTHER; note = A nucleoside-replacement group characterized by the lack of a nucleotide base
  modified_base 16: mod_base = OTHER; note = A nucleoside-replacement group characterized by the lack of a nucleotide base
tctttccnggaaaccnaggcagc

SEQ ID NO: 10826 - DNA, 23 bp, synthetic construct
  source 1..23: mol_type = other DNA
  modified_base 8: mod_base = OTHER; note = A nucleoside-replacement group characterized by the lack of a nucleotide base
  modified_base 16: mod_base = OTHER; note = A nucleoside-replacement group characterized by the lack of a nucleotide base
gttctttncaggaaanccaggca

SEQ ID NO: 10827 - DNA, 23 bp, synthetic construct
  source 1..23: mol_type = other DNA
  modified_base 8: mod_base = OTHER; note = A nucleoside-replacement group characterized by the lack of a nucleotide base
  modified_base 16: mod_base = OTHER; note = A nucleoside-replacement group characterized by the lack of a nucleotide base
ttctttcnaggaaacncaggcag

SEQ ID NO: 10828 - DNA, 23 bp, synthetic construct
  source 1..23: mol_type = other DNA
  modified_base 8: mod_base = OTHER; note = A nucleoside-replacement group characterized by the lack of a nucleotide base
  modified_base 16: mod_base = OTHER; note = A nucleoside-replacement group characterized by the lack of a nucleotide base
tctttccnggaaaccnaggcagc
